United States Patent Application Publication US 2026/0308551 A1, published October 8, 2026 (application 19/149,718).

The application's sequence listing, which the Patent Office published only in electronic form, follows.

SEQUENCE LISTING (128 sequences)

SEQ ID NO: 1 - protein, 1341 aa, Moraxella bovoculi
MPKKKRKVGGGGSGGGGSGGGGSGGGGSGGGGSGGGGSMLFQDFTHLYPLSKTVRFELKPIGRTLEHIHAKNFLSQDETMADMYQKVKVILDDYHRDFIADMMGEVKLTKLAEFYDVYLKFRKNPKDDGLQKQLKDLQAVLRKESVKPIGSGGKYKTGYDRLFGAKLFKDGKELGDLAKFVIAQEGESSPKLAHLAHFEKFSTYFTGFHDNRKNMYSDEDKHTAIAYRLIHENLPRFIDNLQILTTIKQKHSALYDQIINELTASGLDVSLASHLDGYHKLLTQEGITAYNRIIGEVNGYTNKHNQICHKSERIAKLRPLHKQILSDGMGVSFLPSKFADDSEMCQAVNEFYRHYTDVFAKVQSLFDGFDDHQKDGIYVEHKNLNELSKQAFGDFALLGRVLDGYYVDVVNPEFNERFAKAKTDNAKAKLTKEKDKFIKGVHSLASLEQAIEHHTARHDDESVQAGKLGQYFKHGLAGVDNPIQKIHNNHSTIKGFLERERPAGERALPKIKSGKNPEMTQLRQLKELLDNALNVAHFAKLLTTKTTLDNQDGNFYGEFGVLYDELAKIPTLYNKVRDYLSQKPFSTEKYKLNFGNPTLLNGWDLNKEKDNFGVILQKDGCYYLALLDKAHKKVFDNAPNTGKNVYQKMVYKLLPGPNKMLPKVFFAKSNLDYYNPSAELLDKYAKGTHKKGDNFNLKDCHALIDFFKAGINKHPEWQHFGFKFSPTSSYRDLSDFYREVEPQGYQVKFVDINADYIDELVEQGKLYLFQIYNKDFSPKAHGKPNLHTLYFKALFSEDNLADPIYKLNGEAQIFYRKASLDMNETTIHRAGEVLENKNPDNPKKRQFVYDIIKDKRYTQDKFMLHVPITMNFGVQGMTIKEFNKKVNQSIQQYDEVNVIGIDRGERHLLYLTVINSKGEILEQRSLNDITTASANGTQVTTPYHKILDKREIERLNARVGWGEIETIKELKSGYLSHVVHQINQLMLKYNAIVVLEDLNFGFKRGRFKVEKQIYQNFENALIKKLNHLVLKDKADDEIGSYKNALQLTNNFTDLKSIGKQTGFLFYVPAWNTSKIDPETGFVDLLKPRYENIAQSQAFFGKFDKICYNTDKGYFEFHIDYAKFTDKAKNSRQKWAICSHGDKRYVYDKTANQNKGAAKGINVNDELKSLFARYHINDKQPNLVMDICQNNDKEFHKSLMCLLKTLLALRYSNASSDEDFILSPVANDEGVFFNSALADDTQPQNADANGAYHIALKGLWLLNELKNSDDLNKVKLAIDNQTWLNFAQNRGGGGSGGGGSGGGGSGGGGSGGGGSGGGGSPKKKRKVSGGSSGGSPKKKRKV

SEQ ID NO: 2 - DNA, 4026 bp, Moraxella bovoculi
  source 1..4026: mol_type = genomic DNA
atgccgaagaagaagcgcaaggtcgggggcgggggctcaggcgggggcgggagcggcggcgggggctctgggggcggcggcagcggcgggggcggcagcgggggcggcgggtcgatgctgttccaggatttcactcatctgtaccctctctcaaagactgttcggttcgagctcaagcctattgggcggactctggagcacatccacgcgaagaacttcctcagccaggacgaaaccatggccgacatgtaccagaaggtcaaggtcatcctcgacgactaccacagggacttcatcgcggacatgatgggcgaggtgaagctgacgaagctcgccgagttctacgacgtctacctcaagttccgcaagaacccgaaggacgacggcctccagaagcagctcaaggacctgcaggccgtcctgaggaaggagtccgtcaagcccatcggcagcggcggcaagtacaagaccggctacgacaggctgttcggcgccaagctgttcaaggacggcaaggagctcggcgacctggcgaagttcgtgatcgcgcaggagggcgagagctcccccaagctggcccacctggcccacttcgagaagttcagcacgtacttcaccggcttccacgacaacaggaagaacatgtacagcgacgaggacaagcacacggccatcgcctaccgcctcatccacgagaacctgccccgcttcatcgacaacctgcagatcctgacgaccatcaagcagaagcactccgccctgtacgaccagatcatcaacgagctcaccgcgagcggcctcgacgtgtccctcgccagccacctcgacggctaccacaagctcctgacccaggagggcatcaccgcctacaaccgcatcatcggcgaggtgaacggctacaccaacaagcacaaccagatctgccacaagtccgagaggatcgccaagctcaggcccctgcacaagcagatcctcagcgacggcatgggcgtgagcttcctcccgtccaagttcgccgacgactccgagatgtgccaggccgtgaacgagttctacaggcactacaccgacgtgttcgccaaggtgcagtccctgttcgacggcttcgacgaccaccagaaggacggcatctacgtggagcacaagaacctgaacgagctgtccaagcaggccttcggcgacttcgccctcctgggccgcgtgctggacggctactacgtggacgtcgtgaacccggagttcaacgagcgcttcgcgaaggcgaagacggacaacgcgaaggccaagctcaccaaggagaaggacaagttcatcaagggcgtccacagcctcgcgtccctggagcaggcgatcgagcaccacaccgcgcgccacgacgacgagtccgtgcaggccggcaagctcggccagtacttcaagcacggcctggccggcgtcgacaacccgatccagaagatccacaacaaccactccaccatcaagggcttcctggagagggagcgcccggcgggcgagcgcgcgctccccaagatcaagtccggcaagaaccccgagatgacgcagctcaggcagctgaaggagctgctcgacaacgcgctcaacgtggcgcacttcgccaagctgctcacgaccaagaccacgctggacaaccaggacggcaacttctacggcgagttcggcgtcctgtacgacgagctggcgaagatcccgaccctgtacaacaaggtccgcgactacctgagccagaagcccttctccaccgagaagtacaagctcaacttcggcaacccgaccctcctgaacggctgggacctcaacaaggagaaggacaacttcggcgtgatcctccagaaggacggctgctactacctcgccctgctggacaaggcgcacaagaaggtcttcgacaacgccccgaacaccggcaagaacgtgtaccagaagatggtgtacaagctgctccccggccccaacaagatgctgccgaaggtgttcttcgcgaagtccaacctcgactactacaaccccagcgccgagctcctggacaagtacgccaagggcacgcacaagaagggcgacaacttcaacctcaaggactgccacgcgctgatcgacttcttcaaggcgggcatcaacaagcaccccgagtggcagcacttcggcttcaagttcagcccgacctccagctacagggacctcagcgacttctaccgcgaggtggagccccagggctaccaggtgaagttcgtcgacatcaacgccgactacatcgacgagctcgtcgagcagggcaagctctacctgttccagatctacaacaaggacttctccccgaaggcccacggcaagccgaacctccacacgctctacttcaaggccctcttcagcgaggacaacctggccgacccgatctacaagctcaacggcgaggcgcagatcttctaccgcaaggccagcctggacatgaacgaaacgaccatccacagggccggcgaggtcctggagaacaagaacccggacaacccgaagaagaggcagttcgtctacgacatcatcaaggacaagaggtacacccaggacaagttcatgctccacgtcccgatcaccatgaacttcggcgtccagggcatgaccatcaaggagttcaacaagaaggtcaaccagagcatccagcagtacgacgaggtgaacgtcatcggcatcgaccgcggcgagaggcacctgctctacctgacggtcatcaactccaagggcgagatcctcgagcagcgcagcctgaacgacatcacgaccgcgagcgccaacggcacgcaggtcaccacgccgtaccacaagatcctcgacaagcgcgagatcgagaggctgaacgcgcgcgtcggctggggcgagatcgaaacgatcaaggagctcaagtccggctacctcagccacgtcgtgcaccagatcaaccagctcatgctgaagtacaacgcgatcgtggtcctcgaggacctgaacttcggcttcaagaggggccgcttcaaggtggagaagcagatctaccagaacttcgagaacgccctgatcaagaagctcaaccacctggtcctcaaggacaaggcggacgacgagatcggcagctacaagaacgcgctccagctgaccaacaacttcacggacctcaagtccatcggcaagcagacgggcttcctgttctacgtgccggcgtggaacacctccaagatcgacccggaaaccggcttcgtcgacctgctcaagccgcgctacgagaacatcgcgcagtcccaggcgttcttcggcaagttcgacaagatctgctacaacaccgacaagggctacttcgagttccacatcgactacgcgaagttcaccgacaaggccaagaactccaggcagaagtgggccatctgcagccacggcgacaagcgctacgtgtacgacaagacggcgaaccagaacaagggcgcggccaagggcatcaacgtgaacgacgagctgaagtccctcttcgcgcgctaccacatcaacgacaagcagccgaacctcgtcatggacatctgccagaacaacgacaaggagttccacaagagcctgatgtgcctgctcaagaccctgctcgccctccgctactccaacgcgagctccgacgaggacttcatcctcagccccgtcgcgaacgacgagggcgtgttcttcaactccgccctcgcggacgacacgcagccgcagaacgccgacgcgaacggcgcctaccacatcgccctcaagggcctgtggctgctcaacgagctcaagaactccgacgacctgaacaaggtgaagctcgccattgacaaccagacgtggctgaatttcgctcagaatagggggggcgggggctcaggcgggggcgggagcggcggcgggggctctgggggcggcggcagcggcgggggcggcagcgggggcggcgggtcgccgaagaagaagcgcaaggtgtccggcggcagctccggcggcagcccgaagaagaagcgcaaagtgtga

SEQ ID NO: 3 - protein, 1341 aa, synthetic construct
MPKKKRKVGGGGSGGGGSGGGGSGGGGSGGGGSGGGGSMLFQDFTHLYPLSKTVRFELKPIGRTLEHIHAKNFLSQDETMADMYQKVKVILDDYHRDFIADMMGEVKLTKLAEFYDVYLKFRKNPKDDGLQKQLKDLQAVLRKESVKPIGSGGKYKTGYDRLFGAKLFKDGKELGDLAKFVIAQEGESSPKLAHLAHFEKFSTYFTGFHRNRKNMYSDEDKHTAIAYRLIHENLPRFIDNLQILTTIKQKHSALYDQIINELTASGLDVSLASHLDGYHKLLTQEGITAYNRIIGEVNGYTNKHNQICHKSERIAKLRPLHKQILSDGMGVSFLPSKFADDSEMCQAVNEFYRHYTDVFAKVQSLFDGFDDHQKDGIYVEHKNLNELSKQAFGDFALLGRVLDGYYVDVVNPEFNERFAKAKTDNAKAKLTKEKDKFIKGVHSLASLEQAIEHHTARHDDESVQAGKLGQYFKHGLAGVDNPIQKIHNNHSTIKGFLERERPAGERALPKIKSGKNPEMTQLRQLKELLDNALNVAHFAKLLTTKTTLDNQDGNFYGEFGVLYDELAKIPTLYNKVRDYLSQKPFSTEKYKLNFGNPTLLNGWDLNKEKDNFGVILQKDGCYYLALLDKAHKKVFDNAPNTGKNVYQKMVYKLLPGPNKMLPKVFFAKSNLDYYNPSAELLDKYAKGTHKKGDNFNLKDCHALIDFFKAGINKHPEWQHFGFKFSPTSSYRDLSDFYREVEPQGYQVKFVDINADYIDELVEQGKLYLFQIYNKDFSPKAHGKPNLHTLYFKALFSEDNLADPIYKLNGEAQIFYRKASLDMNETTIHRAGEVLENKNPDNPKKRQFVYDIIKDKRYTQDKFMLHVPITMNFGVQGMTIKEFNKKVNQSIQQYDEVNVIGIDRGERHLLYLTVINSKGEILEQRSLNDITTASANGTQVTTPYHKILDKREIERLNARVGWGEIETIKELKSGYLSHVVHQINQLMLKYNAIVVLEDLNFGFKRGRFKVEKQIYQNFENALIKKLNHLVLKDKADDEIGSYKNALQLTNNFTDLKSIGKQTGFLFYVPAWNTSKIDPETGFVDLLKPRYENIAQSQAFFGKFDKICYNTDKGYFEFHIDYAKFTDKAKNSRQKWAICSHGDKRYVYDKTANQNKGAAKGINVNDELKSLFARYHINDKQPNLVMDICQNNDKEFHKSLMCLLKTLLALRYSNASSDEDFILSPVANDEGVFFNSALADDTQPQNADANGAYHIALKGLWLLNELKNSDDLNKVKLAIDNQTWLNFAQNRGGGGSGGGGSGGGGSGGGGSGGGGSGGGGSPKKKRKVSGGSSGGSPKKKRKV

SEQ ID NO: 4 - DNA, 4026 bp, synthetic construct
  source 1..4026: mol_type = other DNA
atgccgaagaagaagcgcaaggtcgggggcgggggctcaggcgggggcgggagcggcggcgggggctctgggggcggcggcagcggcgggggcggcagcgggggcggcgggtcgatgctgttccaggatttcactcatctgtaccctctctcaaagactgttcggttcgagctcaagcctattgggcggactctggagcacatccacgcgaagaacttcctcagccaggacgaaaccatggccgacatgtaccagaaggtcaaggtcatcctcgacgactaccacagggacttcatcgcggacatgatgggcgaggtgaagctgacgaagctcgccgagttctacgacgtctacctcaagttccgcaagaacccgaaggacgacggcctccagaagcagctcaaggacctgcaggccgtcctgaggaaggagtccgtcaagcccatcggcagcggcggcaagtacaagaccggctacgacaggctgttcggcgccaagctgttcaaggacggcaaggagctcggcgacctggcgaagttcgtgatcgcgcaggagggcgagagctcccccaagctggcccacctggcccacttcgagaagttcagcacgtacttcaccggcttccacaggaacaggaagaacatgtacagcgacgaggacaagcacacggccatcgcctaccgcctcatccacgagaacctgccccgcttcatcgacaacctgcagatcctgacgaccatcaagcagaagcactccgccctgtacgaccagatcatcaacgagctcaccgcgagcggcctcgacgtgtccctcgccagccacctcgacggctaccacaagctcctgacccaggagggcatcaccgcctacaaccgcatcatcggcgaggtgaacggctacaccaacaagcacaaccagatctgccacaagtccgagaggatcgccaagctcaggcccctgcacaagcagatcctcagcgacggcatgggcgtgagcttcctcccgtccaagttcgccgacgactccgagatgtgccaggccgtgaacgagttctacaggcactacaccgacgtgttcgccaaggtgcagtccctgttcgacggcttcgacgaccaccagaaggacggcatctacgtggagcacaagaacctgaacgagctgtccaagcaggccttcggcgacttcgccctcctgggccgcgtgctggacggctactacgtggacgtcgtgaacccggagttcaacgagcgcttcgcgaaggcgaagacggacaacgcgaaggccaagctcaccaaggagaaggacaagttcatcaagggcgtccacagcctcgcgtccctggagcaggcgatcgagcaccacaccgcgcgccacgacgacgagtccgtgcaggccggcaagctcggccagtacttcaagcacggcctggccggcgtcgacaacccgatccagaagatccacaacaaccactccaccatcaagggcttcctggagagggagcgcccggcgggcgagcgcgcgctccccaagatcaagtccggcaagaaccccgagatgacgcagctcaggcagctgaaggagctgctcgacaacgcgctcaacgtggcgcacttcgccaagctgctcacgaccaagaccacgctggacaaccaggacggcaacttctacggcgagttcggcgtcctgtacgacgagctggcgaagatcccgaccctgtacaacaaggtccgcgactacctgagccagaagcccttctccaccgagaagtacaagctcaacttcggcaacccgaccctcctgaacggctgggacctcaacaaggagaaggacaacttcggcgtgatcctccagaaggacggctgctactacctcgccctgctggacaaggcgcacaagaaggtcttcgacaacgccccgaacaccggcaagaacgtgtaccagaagatggtgtacaagctgctccccggccccaacaagatgctgccgaaggtgttcttcgcgaagtccaacctcgactactacaaccccagcgccgagctcctggacaagtacgccaagggcacgcacaagaagggcgacaacttcaacctcaaggactgccacgcgctgatcgacttcttcaaggcgggcatcaacaagcaccccgagtggcagcacttcggcttcaagttcagcccgacctccagctacagggacctcagcgacttctaccgcgaggtggagccccagggctaccaggtgaagttcgtcgacatcaacgccgactacatcgacgagctcgtcgagcagggcaagctctacctgttccagatctacaacaaggacttctccccgaaggcccacggcaagccgaacctccacacgctctacttcaaggccctcttcagcgaggacaacctggccgacccgatctacaagctcaacggcgaggcgcagatcttctaccgcaaggccagcctggacatgaacgaaacgaccatccacagggccggcgaggtcctggagaacaagaacccggacaacccgaagaagaggcagttcgtctacgacatcatcaaggacaagaggtacacccaggacaagttcatgctccacgtcccgatcaccatgaacttcggcgtccagggcatgaccatcaaggagttcaacaagaaggtcaaccagagcatccagcagtacgacgaggtgaacgtcatcggcatcgaccgcggcgagaggcacctgctctacctgacggtcatcaactccaagggcgagatcctcgagcagcgcagcctgaacgacatcacgaccgcgagcgccaacggcacgcaggtcaccacgccgtaccacaagatcctcgacaagcgcgagatcgagaggctgaacgcgcgcgtcggctggggcgagatcgaaacgatcaaggagctcaagtccggctacctcagccacgtcgtgcaccagatcaaccagctcatgctgaagtacaacgcgatcgtggtcctcgaggacctgaacttcggcttcaagaggggccgcttcaaggtggagaagcagatctaccagaacttcgagaacgccctgatcaagaagctcaaccacctggtcctcaaggacaaggcggacgacgagatcggcagctacaagaacgcgctccagctgaccaacaacttcacggacctcaagtccatcggcaagcagacgggcttcctgttctacgtgccggcgtggaacacctccaagatcgacccggaaaccggcttcgtcgacctgctcaagccgcgctacgagaacatcgcgcagtcccaggcgttcttcggcaagttcgacaagatctgctacaacaccgacaagggctacttcgagttccacatcgactacgcgaagttcaccgacaaggccaagaactccaggcagaagtgggccatctgcagccacggcgacaagcgctacgtgtacgacaagacggcgaaccagaacaagggcgcggccaagggcatcaacgtgaacgacgagctgaagtccctcttcgcgcgctaccacatcaacgacaagcagccgaacctcgtcatggacatctgccagaacaacgacaaggagttccacaagagcctgatgtgcctgctcaagaccctgctcgccctccgctactccaacgcgagctccgacgaggacttcatcctcagccccgtcgcgaacgacgagggcgtgttcttcaactccgccctcgcggacgacacgcagccgcagaacgccgacgcgaacggcgcctaccacatcgccctcaagggcctgtggctgctcaacgagctcaagaactccgacgacctgaacaaggtgaagctcgccattgacaaccagacgtggctgaatttcgctcagaatagggggggcgggggctcaggcgggggcgggagcggcggcgggggctctgggggcggcggcagcggcgggggcggcagcgggggcggcgggtcgccgaagaagaagcgcaaggtgtccggcggcagctccggcggcagcccgaagaagaagcgcaaagtgtga

SEQ ID NO: 5 - protein, 1341 aa, synthetic construct
MPKKKRKVGGGGSGGGGSGGGGSGGGGSGGGGSGGGGSMLFQDFTHLYPLSKTVRFELKPIGRTLEHIHAKNFLSQDETMADMYQKVKVILDDYHRDFIADMMGEVKLTKLAEFYDVYLKFRKNPKDDGLQKQLKDLQAVLRKESVKPIGSGGKYKTGYDRLFGAKLFKDGKELGDLAKFVIAQEGESSPKLAHLAHFEKFSTYFTGFHKNRKNMYSDEDKHTAIAYRLIHENLPRFIDNLQILTTIKQKHSALYDQIINELTASGLDVSLASHLDGYHKLLTQEGITAYNRIIGEVNGYTNKHNQICHKSERIAKLRPLHKQILSDGMGVSFLPSKFADDSEMCQAVNEFYRHYTDVFAKVQSLFDGFDDHQKDGIYVEHKNLNELSKQAFGDFALLGRVLDGYYVDVVNPEFNERFAKAKTDNAKAKLTKEKDKFIKGVHSLASLEQAIEHHTARHDDESVQAGKLGQYFKHGLAGVDNPIQKIHNNHSTIKGFLERERPAGERALPKIKSGKNPEMTQLRQLKELLDNALNVAHFAKLLTTKTTLDNQDGNFYGEFGVLYDELAKIPTLYNKVRDYLSQKPFSTEKYKLNFGNPTLLNGWDLNKEKDNFGVILQKDGCYYLALLDKAHKKVFDNAPNTGKNVYQKMVYKLLPGPNKMLPKVFFAKSNLDYYNPSAELLDKYAKGTHKKGDNFNLKDCHALIDFFKAGINKHPEWQHFGFKFSPTSSYRDLSDFYREVEPQGYQVKFVDINADYIDELVEQGKLYLFQIYNKDFSPKAHGKPNLHTLYFKALFSEDNLADPIYKLNGEAQIFYRKASLDMNETTIHRAGEVLENKNPDNPKKRQFVYDIIKDKRYTQDKFMLHVPITMNFGVQGMTIKEFNKKVNQSIQQYDEVNVIGIDRGERHLLYLTVINSKGEILEQRSLNDITTASANGTQVTTPYHKILDKREIERLNARVGWGEIETIKELKSGYLSHVVHQINQLMLKYNAIVVLEDLNFGFKRGRFKVEKQIYQNFENALIKKLNHLVLKDKADDEIGSYKNALQLTNNFTDLKSIGKQTGFLFYVPAWNTSKIDPETGFVDLLKPRYENIAQSQAFFGKFDKICYNTDKGYFEFHIDYAKFTDKAKNSRQKWAICSHGDKRYVYDKTANQNKGAAKGINVNDELKSLFARYHINDKQPNLVMDICQNNDKEFHKSLMCLLKTLLALRYSNASSDEDFILSPVANDEGVFFNSALADDTQPQNADANGAYHIALKGLWLLNELKNSDDLNKVKLAIDNQTWLNFAQNRGGGGSGGGGSGGGGSGGGGSGGGGSGGGGSPKKKRKVSGGSSGGSPKKKRKV

SEQ ID NO: 6 - DNA, 4026 bp, synthetic construct
  source 1..4026: mol_type = other DNA
atgccgaagaagaagcgcaaggtcgggggcgggggctcaggcgggggcgggagcggcggcgggggctctgggggcggcggcagcggcgggggcggcagcgggggcggcgggtcgatgctgttccaggatttcactcatctgtaccctctctcaaagactgttcggttcgagctcaagcctattgggcggactctggagcacatccacgcgaagaacttcctcagccaggacgaaaccatggccgacatgtaccagaaggtcaaggtcatcctcgacgactaccacagggacttcatcgcggacatgatgggcgaggtgaagctgacgaagctcgccgagttctacgacgtctacctcaagttccgcaagaacccgaaggacgacggcctccagaagcagctcaaggacctgcaggccgtcctgaggaaggagtccgtcaagcccatcggcagcggcggcaagtacaagaccggctacgacaggctgttcggcgccaagctgttcaaggacggcaaggagctcggcgacctggcgaagttcgtgatcgcgcaggagggcgagagctcccccaagctggcccacctggcccacttcgagaagttcagcacgtacttcaccggcttccacaagaacaggaagaacatgtacagcgacgaggacaagcacacggccatcgcctaccgcctcatccacgagaacctgccccgcttcatcgacaacctgcagatcctgacgaccatcaagcagaagcactccgccctgtacgaccagatcatcaacgagctcaccgcgagcggcctcgacgtgtccctcgccagccacctcgacggctaccacaagctcctgacccaggagggcatcaccgcctacaaccgcatcatcggcgaggtgaacggctacaccaacaagcacaaccagatctgccacaagtccgagaggatcgccaagctcaggcccctgcacaagcagatcctcagcgacggcatgggcgtgagcttcctcccgtccaagttcgccgacgactccgagatgtgccaggccgtgaacgagttctacaggcactacaccgacgtgttcgccaaggtgcagtccctgttcgacggcttcgacgaccaccagaaggacggcatctacgtggagcacaagaacctgaacgagctgtccaagcaggccttcggcgacttcgccctcctgggccgcgtgctggacggctactacgtggacgtcgtgaacccggagttcaacgagcgcttcgcgaaggcgaagacggacaacgcgaaggccaagctcaccaaggagaaggacaagttcatcaagggcgtccacagcctcgcgtccctggagcaggcgatcgagcaccacaccgcgcgccacgacgacgagtccgtgcaggccggcaagctcggccagtacttcaagcacggcctggccggcgtcgacaacccgatccagaagatccacaacaaccactccaccatcaagggcttcctggagagggagcgcccggcgggcgagcgcgcgctccccaagatcaagtccggcaagaaccccgagatgacgcagctcaggcagctgaaggagctgctcgacaacgcgctcaacgtggcgcacttcgccaagctgctcacgaccaagaccacgctggacaaccaggacggcaacttctacggcgagttcggcgtcctgtacgacgagctggcgaagatcccgaccctgtacaacaaggtccgcgactacctgagccagaagcccttctccaccgagaagtacaagctcaacttcggcaacccgaccctcctgaacggctgggacctcaacaaggagaaggacaacttcggcgtgatcctccagaaggacggctgctactacctcgccctgctggacaaggcgcacaagaaggtcttcgacaacgccccgaacaccggcaagaacgtgtaccagaagatggtgtacaagctgctccccggccccaacaagatgctgccgaaggtgttcttcgcgaagtccaacctcgactactacaaccccagcgccgagctcctggacaagtacgccaagggcacgcacaagaagggcgacaacttcaacctcaaggactgccacgcgctgatcgacttcttcaaggcgggcatcaacaagcaccccgagtggcagcacttcggcttcaagttcagcccgacctccagctacagggacctcagcgacttctaccgcgaggtggagccccagggctaccaggtgaagttcgtcgacatcaacgccgactacatcgacgagctcgtcgagcagggcaagctctacctgttccagatctacaacaaggacttctccccgaaggcccacggcaagccgaacctccacacgctctacttcaaggccctcttcagcgaggacaacctggccgacccgatctacaagctcaacggcgaggcgcagatcttctaccgcaaggccagcctggacatgaacgaaacgaccatccacagggccggcgaggtcctggagaacaagaacccggacaacccgaagaagaggcagttcgtctacgacatcatcaaggacaagaggtacacccaggacaagttcatgctccacgtcccgatcaccatgaacttcggcgtccagggcatgaccatcaaggagttcaacaagaaggtcaaccagagcatccagcagtacgacgaggtgaacgtcatcggcatcgaccgcggcgagaggcacctgctctacctgacggtcatcaactccaagggcgagatcctcgagcagcgcagcctgaacgacatcacgaccgcgagcgccaacggcacgcaggtcaccacgccgtaccacaagatcctcgacaagcgcgagatcgagaggctgaacgcgcgcgtcggctggggcgagatcgaaacgatcaaggagctcaagtccggctacctcagccacgtcgtgcaccagatcaaccagctcatgctgaagtacaacgcgatcgtggtcctcgaggacctgaacttcggcttcaagaggggccgcttcaaggtggagaagcagatctaccagaacttcgagaacgccctgatcaagaagctcaaccacctggtcctcaaggacaaggcggacgacgagatcggcagctacaagaacgcgctccagctgaccaacaacttcacggacctcaagtccatcggcaagcagacgggcttcctgttctacgtgccggcgtggaacacctccaagatcgacccggaaaccggcttcgtcgacctgctcaagccgcgctacgagaacatcgcgcagtcccaggcgttcttcggcaagttcgacaagatctgctacaacaccgacaagggctacttcgagttccacatcgactacgcgaagttcaccgacaaggccaagaactccaggcagaagtgggccatctgcagccacggcgacaagcgctacgtgtacgacaagacggcgaaccagaacaagggcgcggccaagggcatcaacgtgaacgacgagctgaagtccctcttcgcgcgctaccacatcaacgacaagcagccgaacctcgtcatggacatctgccagaacaacgacaaggagttccacaagagcctgatgtgcctgctcaagaccctgctcgccctccgctactccaacgcgagctccgacgaggacttcatcctcagccccgtcgcgaacgacgagggcgtgttcttcaactccgccctcgcggacgacacgcagccgcagaacgccgacgcgaacggcgcctaccacatcgccctcaagggcctgtggctgctcaacgagctcaagaactccgacgacctgaacaaggtgaagctcgccattgacaaccagacgtggctgaatttcgctcagaatagggggggcgggggctcaggcgggggcgggagcggcggcgggggctctgggggcggcggcagcggcgggggcggcagcgggggcggcgggtcgccgaagaagaagcgcaaggtgtccggcggcagctccggcggcagcccgaagaagaagcgcaaagtgtga

SEQ ID NO: 7 - DNA, 1802 bp, Saccharum officinarum
  source 1..1802: mol_type = genomic DNA
gaattcattatgtggtctaggtaggttctatatataagaaaacttgaaatgttctaaaaaaaaattcaagcccatgcatgattgaagcaaacggtatagcaacggtgttaacctgatctagtgatctcttgcaatccttaacggccacctaccgcaggtagcaaacggcgtccccctcctcgatatctccgcggcgacctctggctttttccgcggaattgcgcggtggggacggattccacgagaccgcgacgcaaccgcctctcgccgctgggccccacaccgctcggtgccgtagcctcacgggactctttctccctcctcccccgttataaattggcttcatcccctccttgcctcatccatccaaatcccagtccccaatcccatcccttcgtaggagaaattcatcgaagctaagcgaatcctcgcgatcctctcaaggtactgcgagttttcgatccccctctcgacccctcgtatgtttgtgtttgtcgtagcgtttgattaggtatgctttccctgtttgtgttcgtcgtagcgtttgattaggtatgctttccctgttcgtgttcatcgtagtgtttgattaggtcgtgtgaggcgatggcctgctcgcgtccttcgatctgtagtcgatttgcgggtcgtggtgtagatctgcgggctgtgatgaagttatttggtgtgatctgctcgcctgattctgcgggttggctcgagtagatatgatggttggaccggttggttcgtttaccgcgctagggttgggctgggatgatgttgcatgcgccgttgcgcgtgatcccgcagcaggacttgcgtttgattgccagatctcgttacgattatgtgatttggtttggactttttagatctgtagcttctgcttatgtgccagatgcgcctactgctcatatgcctgatgataatcataaatggctgtggaactaactagttgattgcggagtcatgtatcagctacaggtgtagggactagctacaggtgtagggacttgcgtctaattgtttggtcctttactcatgttgcaattatgcaatttagtttagattgtttgttccactcatctaggctgtaaaagggacactgcttagattgctgtttaatctttttagtagattatattatattggtaacttattacccctattacatgccatacgtgacttctgctcatgcctgatgataatcatagatcactgtggaattaattagttgattgttgaatcatgtttcatgtacataccacggcacaattgcttagttccttaacaaatgcaaattttactgatccatgtatgatttgcgtggttctctaatgtgaaatactatagctacttgttagtaagaatcaggttcgtatgcttaatgctgtatgtgccttctgctcatgcctgatgataatcatatatcactggaattaattagttgatcgtttaatcatatatcaagtacataccatgccacaatttttagtcacttaacccatgcagattgaactggtccctgcatgttttgctaaattgttctattctgattagaccatatatcatgtatttttttttggtaatggttctcttattttaaatgctatatagttctggtacttgttagaaagatctgcttcatagtttagttgcctatccctcgaattaggatgctgagcagctgatcctatagctttgtttcatgtatcaattcttttgtgttcaacagtcagtttttgttagattcattgtaacttatggtcgcttactcttctggtcctcaatgcttgcag

SEQ ID NO: 8 - protein, 7 aa, Simian virus 40
PKKKRKV

SEQ ID NO: 9 - protein, 30 aa, synthetic construct
GGGGSGGGGSGGGGSGGGGSGGGGSGGGGS

SEQ ID NO: 10 - protein, 8 aa, synthetic construct
SGGSSGGS

SEQ ID NO: 11 - DNA, 253 bp, Agrobacterium tumefaciens
  source 1..253: mol_type = genomic DNA
gatcgttcaaacatttggcaataaagtttcttaagattgaatcctgttgccggtcttgcgatgattatcatataatttctgttgaattacgttaagcatgtaataattaacatgtaatgcatgacgttatttatgagatgggtttttatgattagagtcccgcaattatacatttaatacgcgatagaaaacaaaatatagcgcgcaaactaggataaattatcgcgcgcggtgtcatctatgttactagatc

SEQ ID NO: 12 - DNA, 37 bp, Tobacco etch virus
  source 1..37: mol_type = genomic DNA
ctgatgagtccgtgaggacgaaacgagtaagctcgtc

SEQ ID NO: 13 - DNA, 68 bp, Hepatitis delta virus
  source 1..68: mol_type = genomic DNA
ggccggcatggtcccagcctcctcgctggcgccggctgggcaacatgcttcggcatggcgaatgggac

SEQ ID NO: 14 - DNA, 173 bp, synthetic construct
  source 1..173: mol_type = other DNA
aatttctactgtttgtagatgggaaagaccgaggagaagatctaatttctactgtttgtagatgcaccaaggaaggggaggagatcaatttctactgtttgtagatgtcacagatcacaaacttcaaatgaatttctactgtttgtagatacgcccagaaagcatacgcagtc

SEQ ID NO: 15 - DNA, 32548 bp, synthetic construct
  source 1..32548: mol_type = other DNA
attcctgtggttggcatgcacatacaaatggacgaacggataaaccttttcacgcccttttaaatatccgattattctaataaacgctcttttctcttaggtttacccgccaatatatcctgtcaaacactgatagtttaaactggcactagcctaacggtgttgactaactaggccgcttccctaattagctaacccgggggcgcgccgggaccggaattcattatgtggtctaggtaggttctatatataagaaaacttgaaatgttctaaaaaaaaattcaagcccatgcatgattgaagcaaacggtatagcaacggtgttaacctgatctagtgatctcttgcaatccttaacggccacctaccgcaggtagcaaacggcgtccccctcctcgatatctccgcggcgacctctggctttttccgcggaattgcgcggtggggacggattccacgagaccgcgacgcaaccgcctctcgccgctgggccccacaccgctcggtgccgtagcctcacgggactctttctccctcctcccccgttataaattggcttcatcccctccttgcctcatccatccaaatcccagtccccaatcccatcccttcgtaggagaaattcatcgaagctaagcgaatcctcgcgatcctctcaaggtactgcgagttttcgatccccctctcgacccctcgtatgtttgtgtttgtcgtagcgtttgattaggtatgctttccctgtttgtgttcgtcgtagcgtttgattaggtatgctttccctgttcgtgttcatcgtagtgtttgattaggtcgtgtgaggcgatggcctgctcgcgtccttcgatctgtagtcgatttgcgggtcgtggtgtagatctgcgggctgtgatgaagttatttggtgtgatctgctcgcctgattctgcgggttggctcgagtagatatgatggttggaccggttggttcgtttaccgcgctagggttgggctgggatgatgttgcatgcgccgttgcgcgtgatcccgcagcaggacttgcgtttgattgccagatctcgttacgattatgtgatttggtttggactttttagatctgtagcttctgcttatgtgccagatgcgcctactgctcatatgcctgatgataatcataaatggctgtggaactaactagttgattgcggagtcatgtatcagctacaggtgtagggactagctacaggtgtagggacttgcgtctaattgtttggtcctttactcatgttgcaattatgcaatttagtttagattgtttgttccactcatctaggctgtaaaagggacactgcttagattgctgtttaatctttttagtagattatattatattggtaacttattacccctattacatgccatacgtgacttctgctcatgcctgatgataatcatagatcactgtggaattaattagttgattgttgaatcatgtttcatgtacataccacggcacaattgcttagttccttaacaaatgcaaattttactgatccatgtatgatttgcgtggttctctaatgtgaaatactatagctacttgttagtaagaatcaggttcgtatgcttaatgctgtatgtgccttctgctcatgcctgatgataatcatatatcactggaattaattagttgatcgtttaatcatatatcaagtacataccatgccacaatttttagtcacttaacccatgcagattgaactggtccctgcatgttttgctaaattgttctattctgattagaccatatatcatgtatttttttttggtaatggttctcttattttaaatgctatatagttctggtacttgttagaaagatctgcttcatagtttagttgcctatccctcgaattaggatgctgagcagctgatcctatagctttgtttcatgtatcaattcttttgtgttcaacagtcagtttttgttagattcattgtaacttatggtcgcttactcttctggtcctcaatgcttgcagggatcccctaaatagaccatgccgaagaagaagcgcaaggtcgggggcgggggctcaggcgggggcgggagcggcggcgggggctctgggggcggcggcagcggcgggggcggcagcgggggcggcgggtcgatgctgttccaggatttcactcatctgtaccctctctcaaagactgttcggttcgagctcaagcctattgggcggactctggagcacatccacgcgaagaacttcctcagccaggacgaaaccatggccgacatgtaccagaaggtcaaggtcatcctcgacgactaccacagggacttcatcgcggacatgatgggcgaggtgaagctgacgaagctcgccgagttctacgacgtctacctcaagttccgcaagaacccgaaggacgacggcctccagaagcagctcaaggacctgcaggccgtcctgaggaaggagtccgtcaagcccatcggcagcggcggcaagtacaagaccggctacgacaggctgttcggcgccaagctgttcaaggacggcaaggagctcggcgacctggcgaagttcgtgatcgcgcaggagggcgagagctcccccaagctggcccacctggcccacttcgagaagttcagcacgtacttcaccggcttccacgacaacaggaagaacatgtacagcgacgaggacaagcacacggccatcgcctaccgcctcatccacgagaacctgccccgcttcatcgacaacctgcagatcctgacgaccatcaagcagaagcactccgccctgtacgaccagatcatcaacgagctcaccgcgagcggcctcgacgtgtccctcgccagccacctcgacggctaccacaagctcctgacccaggagggcatcaccgcctacaaccgcatcatcggcgaggtgaacggctacaccaacaagcacaaccagatctgccacaagtccgagaggatcgccaagctcaggcccctgcacaagcagatcctcagcgacggcatgggcgtgagcttcctcccgtccaagttcgccgacgactccgagatgtgccaggccgtgaacgagttctacaggcactacaccgacgtgttcgccaaggtgcagtccctgttcgacggcttcgacgaccaccagaaggacggcatctacgtggagcacaagaacctgaacgagctgtccaagcaggccttcggcgacttcgccctcctgggccgcgtgctggacggctactacgtggacgtcgtgaacccggagttcaacgagcgcttcgcgaaggcgaagacggacaacgcgaaggccaagctcaccaaggagaaggacaagttcatcaagggcgtccacagcctcgcgtccctggagcaggcgatcgagcaccacaccgcgcgccacgacgacgagtccgtgcaggccggcaagctcggccagtacttcaagcacggcctggccggcgtcgacaacccgatccagaagatccacaacaaccactccaccatcaagggcttcctggagagggagcgcccggcgggcgagcgcgcgctccccaagatcaagtccggcaagaaccccgagatgacgcagctcaggcagctgaaggagctgctcgacaacgcgctcaacgtggcgcacttcgccaagctgctcacgaccaagaccacgctggacaaccaggacggcaacttctacggcgagttcggcgtcctgtacgacgagctggcgaagatcccgaccctgtacaacaaggtccgcgactacctgagccagaagcccttctccaccgagaagtacaagctcaacttcggcaacccgaccctcctgaacggctgggacctcaacaaggagaaggacaacttcggcgtgatcctccagaaggacggctgctactacctcgccctgctggacaaggcgcacaagaaggtcttcgacaacgccccgaacaccggcaagaacgtgtaccagaagatggtgtacaagctgctccccggccccaacaagatgctgccgaaggtgttcttcgcgaagtccaacctcgactactacaaccccagcgccgagctcctggacaagtacgccaagggcacgcacaagaagggcgacaacttcaacctcaaggactgccacgcgctgatcgacttcttcaaggcgggcatcaacaagcaccccgagtggcagcacttcggcttcaagttcagcccgacctccagctacagggacctcagcgacttctaccgcgaggtggagccccagggctaccaggtgaagttcgtcgacatcaacgccgactacatcgacgagctcgtcgagcagggcaagctctacctgttccagatctacaacaaggacttctccccgaaggcccacggcaagccgaacctccacacgctctacttcaaggccctcttcagcgaggacaacctggccgacccgatctacaagctcaacggcgaggcgcagatcttctaccgcaaggccagcctggacatgaacgaaacgaccatccacagggccggcgaggtcctggagaacaagaacccggacaacccgaagaagaggcagttcgtctacgacatcatcaaggacaagaggtacacccaggacaagttcatgctccacgtcccgatcaccatgaacttcggcgtccagggcatgaccatcaaggagttcaacaagaaggtcaaccagagcatccagcagtacgacgaggtgaacgtcatcggcatcgaccgcggcgagaggcacctgctctacctgacggtcatcaactccaagggcgagatcctcgagcagcgcagcctgaacgacatcacgaccgcgagcgccaacggcacgcaggtcaccacgccgtaccacaagatcctcgacaagcgcgagatcgagaggctgaacgcgcgcgtcggctggggcgagatcgaaacgatcaaggagctcaagtccggctacctcagccacgtcgtgcaccagatcaaccagctcatgctgaagtacaacgcgatcgtggtcctcgaggacctgaacttcggcttcaagaggggccgcttcaaggtggagaagcagatctaccagaacttcgagaacgccctgatcaagaagctcaaccacctggtcctcaaggacaaggcggacgacgagatcggcagctacaagaacgcgctccagctgaccaacaacttcacggacctcaagtccatcggcaagcagacgggcttcctgttctacgtgccggcgtggaacacctccaagatcgacccggaaaccggcttcgtcgacctgctcaagccgcgctacgagaacatcgcgcagtcccaggcgttcttcggcaagttcgacaagatctgctacaacaccgacaagggctacttcgagttccacatcgactacgcgaagttcaccgacaaggccaagaactccaggcagaagtgggccatctgcagccacggcgacaagcgctacgtgtacgacaagacggcgaaccagaacaagggcgcggccaagggcatcaacgtgaacgacgagctgaagtccctcttcgcgcgctaccacatcaacgacaagcagccgaacctcgtcatggacatctgccagaacaacgacaaggagttccacaagagcctgatgtgcctgctcaagaccctgctcgccctccgctactccaacgcgagctccgacgaggacttcatcctcagccccgtcgcgaacgacgagggcgtgttcttcaactccgccctcgcggacgacacgcagccgcagaacgccgacgcgaacggcgcctaccacatcgccctcaagggcctgtggctgctcaacgagctcaagaactccgacgacctgaacaaggtgaagctcgccattgacaaccagacgtggctgaatttcgctcagaatagggggggcgggggctcaggcgggggcgggagcggcggcgggggctctgggggcggcggcagcggcgggggcggcagcgggggcggcgggtcgccgaagaagaagcgcaaggtgtccggcggcagctccggcggcagcccgaagaagaagcgcaaagtgtgagggacccgatcgttcaaacatttggcaataaagtttcttaagattgaatcctgttgccggtcttgcgatgattatcatataatttctgttgaattacgttaagcatgtaataattaacatgtaatgcatgacgttatttatgagatgggtttttatgattagagtcccgcaattatacatttaatacgcgatagaaaacaaaatatagcgcgcaaactaggataaattatcgcgcgcggtgtcatctatgttactagatcggtaccgaattcattatgtggtctaggtaggttctatatataagaaaacttgaaatgttctaaaaaaaaattcaagcccatgcatgattgaagcaaacggtatagcaacggtgttaacctgatctagtgatctcttgcaatccttaacggccacctaccgcaggtagcaaacggcgtccccctcctcgatatctccgcggcgacctctggctttttccgcggaattgcgcggtggggacggattccacgagaccgcgacgcaaccgcctctcgccgctgggccccacaccgctcggtgccgtagcctcacgggactctttctccctcctcccccgttataaattggcttcatcccctccttgcctcatccatccaaatcccagtccccaatcccatcccttcgtaggagaaattcatcgaagctaagcgaatcctcgcgatcctctcaaggtactgcgagttttcgatccccctctcgacccctcgtatgtttgtgtttgtcgtagcgtttgattaggtatgctttccctgtttgtgttcgtcgtagcgtttgattaggtatgctttccctgttcgtgttcatcgtagtgtttgattaggtcgtgtgaggcgatggcctgctcgcgtccttcgatctgtagtcgatttgcgggtcgtggtgtagatctgcgggctgtgatgaagttatttggtgtgatctgctcgcctgattctgcgggttggctcgagtagatatgatggttggaccggttggttcgtttaccgcgctagggttgggctgggatgatgttgcatgcgccgttgcgcgtgatcccgcagcaggacttgcgtttgattgccagatctcgttacgattatgtgatttggtttggactttttagatctgtagcttctgcttatgtgccagatgcgcctactgctcatatgcctgatgataatcataaatggctgtggaactaactagttgattgcggagtcatgtatcagctacaggtgtagggactagctacaggtgtagggacttgcgtctaattgtttggtcctttactcatgttgcaattatgcaatttagtttagattgtttgttccactcatctaggctgtaaaagggacactgcttagattgctgtttaatctttttagtagattatattatattggtaacttattacccctattacatgccatacgtgacttctgctcatgcctgatgataatcatagatcactgtggaattaattagttgattgttgaatcatgtttcatgtacataccacggcacaattgcttagttccttaacaaatgcaaattttactgatccatgtatgatttgcgtggttctctaatgtgaaatactatagctacttgttagtaagaatcaggttcgtatgcttaatgctgtatgtgccttctgctcatgcctgatgataatcatatatcactggaattaattagttgatcgtttaatcatatatcaagtacataccatgccacaatttttagtcacttaacccatgcagattgaactggtccctgcatgttttgctaaattgttctattctgattagaccatatatcatgtatttttttttggtaatggttctcttattttaaatgctatatagttctggtacttgttagaaagatctgcttcatagtttagttgcctatccctcgaattaggatgctgagcagctgatcctatagctttgtttcatgtatcaattcttttgtgttcaacagtcagtttttgttagattcattgtaacttatggtcgcttactcttctggtcctcaatgcttgcagaagcttgaaattctgatgagtccgtgaggacgaaacgagtaagctcgtcaatttctactgtttgtagatgggaaagaccgaggagaagatctaatttctactgtttgtagatgcaccaaggaaggggaggagatcaatttctactgtttgtagatgtcacagatcacaaacttcaaatgaatttctactgtttgtagatacgcccagaaagcatacgcagtcggccggcatggtcccagcctcctcgctggcgccggctgggcaacatgcttcggcatggcgaatgggacgatcgttcaaacatttggcaataaagtttcttaagattgaatcctgttgccggtcttgcgatgattatcatataatttctgttgaattacgttaagcatgtaataattaacatgtaatgcatgacgttatttatgagatgggtttttatgattagagtcccgcaattatacatttaatacgcgatagaaaacaaaatatagcgcgcaaactaggataaattatcgcgcgcggtgtcatctatgttactagatccctaggctgcagtgcagcgtgacccggtcgtgcccctctctagagataatgagcattgcatgtctaagttataaaaaattaccacatattttttttgtcacacttgtttgaagtgcagtttatctatctttatacatatatttaaactttactctacgaataatataatctatagtactacaataatatcagtgttttagagaatcatataaatgaacagttagacatggtctaaaggacaattgagtattttgacaacaggactctacagttttatctttttagtgtgcatgtgttctcctttttttttgcaaatagcttcacctatataatacttcatccattttattagtacatccatttagggtttagggttaatggtttttatagactaatttttttagtacatctattttattctattttagcctctaaattaagaaaactaaaactctattttagtttttttatttaataatttagatataaaatagaataaaataaagtgactaaaaattaaacaaataccctttaagaaattaaaaaaactaaggaaacatttttcttgtttcgagtagataatgccagcctgttaaacgccgtcgacgagtctaacggacaccaaccagcgaaccagcagcgtcgcgtcgggccaagcgaagcagacggcacggcatctctgtcgctgcctctggacccctctcgagagttccgctccaccgttggacttgctccgctgtcggcatccagaaattgcgtggcggagcggcagacgtgagccggcacggcaggcggcctcctcctcctctcacggcaccggcagctacgggggattcctttcccaccgctccttcgctttcccttcctcgcccgccgtaataaatagacaccccctccacaccctctttccccaacctcgtgttgttcggagcgcacacacacacaaccagatctcccccaaatccacccgtcggcacctccgcttcaaggtacgccgctcgtcctccccccccccccctctctaccttctctagatcggcgttccggtccatggttagggcccggtagttctacttctgttcatgtttgtgttagatccgtgtttgtgttagatccgtgctgctagcgttcgtacacggatgcgacctgtacgtcagacacgttctgattgctaacttgccagtgtttctctttggggaatcctgggatggctctagccgttccgcagacgggatcgatttcatgattttttttgtttcgttgcatagggtttggtttgcccttttcctttatttcaatatatgccgtgcacttgtttgtcgggtcatcttttcatgcttttttttgtcttggttgtgatgatgtggtctggttgggcggtcgttctagatcggagtagaattctgtttcaaactacctggtggatttattaattttggatctgtatgtgtgtgccatacatattcatagttacgaattgaagatgatggatggaaatatcgatctaggataggtatacatgttgatgcgggttttactgatgcatatacagagatgctttttgttcgcttggttgtgatgatgtggtgtggttgggcggtcgttcattcgttctagatcggagtagaatactgtttcaaactacctggtgtatttattaattttggaactgtatgtgtgtgtcatacatcttcatagttacgagtttaagatggatggaaatatcgatctaggataggtatacatgttgatgtgggttttactgatgcatatacatgatggcatatgcagcatctattcatatgctctaaccttgagtacctatctattataataaacaagtatgttttataattattttgatcttgatatacttggatgatggcatatgcagcagctatatgtggatttttttagccctgccttcatacgctatttatttgcttggtactgtttcttttgtcgatgctcaccctgttgtttggtgttacttctgcagggatcaccgatcatgcaaaaactcattaactcagtgcaaaactatgcctggggcagcaaaacggcgttgactgaactttatggtatggaaaatccgtccagccagccgatggccgagctgtggatgggcgcacatccgaaaagcagttcacgagtgcagaatgccgccggagatatcgtttcactgcgtgatgtgattgagagtgataaatcgactctgctcggagaggccgttgccaaacgctttggcgaactgcctttcctgttcaaagtattatgcgcagcacagccactctccattcaggttcatccaaacaaacacaattctgaaatcggttttgccaaagaaaatgccgcaggtatcccgatggatgccgccgagcgtaactataaagatcctaaccacaagccggagctggtttttgcgctgacgcctttccttgcgatgaacgcgtttcgtgaattttccgagattgtctccctactccagccggtcgcaggtgcacatccggcgattgctcactttttacaacagcctgatgccgaacgtttaagcgaactgttcgccagcctgttgaatatgcagggtgaagaaaaatcccgcgcgctggcgattttaaaatcggccctcgatagccagcagggtgaaccgtggcaaacgattcgtttaatttctgaattttacccggaagacagcggtctgttctccccgctattgctgaatgtggtgaaattgaaccctggcgaagcgatgttcctgttcgctgaaacaccgcacgcttacctgcaaggcgtggcgctggaagtgatggcaaactccgataacgtgctgcgtgcgggtctgacgcctaaatacattgatattccggaactggttgccaatgtgaaattcgaagccaaaccggctaaccagttgttgacccagccggtgaaacaaggtgcagaactggacttcccgattccagtggatgattttgccttctcgctgcatgaccttagtgataaagaaaccaccattagccagcagagtgccgccattttgttctgcgtcgaaggcgatgcaacgttgtggaaaggttctcagcagttacagcttaaaccgggtgaatcagcgtttattgccgccaacgaatcaccggtgactgtcaaaggccacggccgtttagcgcgtgtttacaacaagctgtaagagcttactgaaaaaattaacatctcttgctaagctgggagctcgatccgtcgacctgcagatcgttcaaacatttggcaataaagtttcttaagattgaatcctgttgccggtcttgcgatgattatcatataatttctgttgaattacgttaagcatgtaataattaacatgtaatgcatgacgttatttatgagatgggtttttatgattagagtcccgcaattatacatttaatacgcgatagaaaacaaaatatagcgcgcaaactaggataaattatcgcgcgcggtgtcatctatgttactagatccggaccgcctgcaggcccgggggcgcgccctaattagctaacggccaggatcgccgcgtgagcctttagcaactagctagattaattaacgcaatctgttattaagttgtctaagcgtcaatttgtttacaccacaatatatcctgccaccagccagccaacagctccccgaccggcagctcggcacaaaatcaccactcgatacaggcagcccatcagaattaattctcatgtttgacagcttatcatcgactgcacggtgcaccaatgcttctggcgtcaggcagccatcggaagctgtggtatggctgtgcaggtcgtaaatcactgcataattcgtgtcgctcaaggcgcactcccgttctggataatgttttttgcgccgacatcataacggttctggcaaatattctgaaatgagctgttgacaattaatcatccggctcgtataatgtgtggaattgtgagcggataacaatttcacacaggaaacagaccatgagggaagcgttgatcgccgaagtatcgactcaactatcagaggtagttggcgtcatcgagcgccatctcgaaccgacgttgctggccgtacatttgtacggctccgcagtggatggcggcctgaagccacacagtgatattgatttgctggttacggtgaccgtaaggcttgatgaaacaacgcggcgagctttgatcaacgaccttttggaaacttcggcttcccctggagagagcgagattctccgcgctgtagaagtcaccattgttgtgcacgacgacatcattccgtggcgttatccagctaagcgcgaactgcaatttggagaatggcagcgcaatgacattcttgcaggtatcttcgagccagccacgatcgacattgatctggctatcttgctgacaaaagcaagagaacatagcgttgccttggtaggtccagcggcggaggaactctttgatccggttcctgaacaggatctatttgaggcgctaaatgaaaccttaacgctatggaactcgccgcccgactgggctggcgatgagcgaaatgtagtgcttacgttgtcccgcatttggtacagcgcagtaaccggcaaaatcgcgccgaaggatgtcgctgccgactgggcaatggagcgcctgccggcccagtatcagcccgtcatacttgaagctaggcaggcttatcttggacaagaagatcgcttggcctcgcgcgcagatcagttggaagaatttgttcactacgtgaaaggcgagatcaccaaagtagtcggcaaataaagctctagtggatctccgtacccagggatctggctcgcggcggacgcacgacgccggggcgagaccataggcgatctcctaaatcaatagtagctgtaacctcgaagcgtttcacttgtaacaacgattgagaatttttgtcataaaattgaaatacttggttcgcatttttgtcatccgcggtcagccgcaattctgacgaactgcccatttagctggagatgattgtacatccttcacgtgaaaatttctcaagcgctgtgaacaagggttcagattttagattgaaaggtgagccgttgaaacacgttcttcttgtcgatgacgacgtcgctatgcggcatcttattattgaataccttacgatccacgccttcaaagtgaccgcggtagccgacagcacccagttcacaagagtactctcttccgcgacggtcgatgtcgtggttgttgatctagatttaggtcgtgaagatgggctcgagatcgttcgtaatctggcggcaaagtctgatattccaatcataattatcagtggcgaccgccttgaggagacggataaagttgttgcactcgagctaggagcaagtgattttatcgctaagccgttcagtatcagagagtttctagcacgcattcgggttgccttgcgcgtgcgccccaacgttgtccgctccaaagaccgacggtctttttgttttactgactggacacttaatctcaggcaacgtcgcttgatgtccgaagctggcggtgaggtgaaacttacggcaggtgagttcaatcttctcctcgcgtttttagagaaaccccgcgacgttctatcgcgcgagcaacttctcattgccagtcgagtacgcgacgaggaggtttatgacaggagtatagatgttctcattttgaggctgcgccgcaaacttgaggcagatccgtcaagccctcaactgataaaaacagcaagaggtgccggttatttctttgacgcggacgtgcaggtttcgcacggggggacgatggcagcctgagccaattcccagatccccgaggaatcggcgtgagcggtcgcaaaccatccggcccggtacaaatcggcgcggcgctgggtgatgacctggtggagaagttgaaggccgcgcaggccgcccagcggcaacgcatcgaggcagaagcacgccccggtgaatcgtggcaagcggccgctgatcgaatccgcaaagaatcccggcaaccgccggcagccggtgcgccgtcgattaggaagccgcccaagggcgacgagcaaccagattttttcgttccgatgctctatgacgtgggcacccgcgatagtcgcagcatcatggacgtggccgttttccgtctgtcgaagcgtgaccgacgagctggcgaggtgatccgctacgagcttccagacgggcacgtagaggtttccgcagggccggccggcatggccagtgtgtgggattacgacctggtactgatggcggtttcccatctaaccgaatccatgaaccgataccgggaagggaagggagacaagcccggccgcgtgttccgtccacacgttgcggacgtactcaagttctgccggcgagccgatggcggaaagcagaaagacgacctggtagaaacctgcataaacgctcttttctcttaggtttacccgccaatatatcctgtcaaacactgatagtttaaactggcactagcctaacggtgttgactaactaggccgcttccctaattagctaacccgggggcgcgccgggaccggaattcattatgtggtctaggtaggttctatatataagaaaacttgaaatgttctaaaaaaaaattcaagcccatgcatgattgaagcaaacggtatagcaacggtgttaacctgatctagtgatctcttgcaatccttaacggccacctaccgcaggtagcaaacggcgtccccctcctcgatatctccgcggcgacctctggctttttccgcggaattgcgcggtggggacggattccacgagaccgcgacgcaaccgcctctcgccgctgggccccacaccgctcggtgccgtagcctcacgggactctttctccctcctcccccgttataaattggcttcatcccctccttgcctcatccatccaaatcccagtccccaatcccatcccttcgtaggagaaattcatcgaagctaagcgaatcctcgcgatcctctcaaggtactgcgagttttcgatccccctctcgacccctcgtatgtttgtgtttgtcgtagcgtttgattaggtatgctttccctgtttgtgttcgtcgtagcgtttgattaggtatgctttccctgttcgtgttcatcgtagtgtttgattaggtcgtgtgaggcgatggcctgctcgcgtccttcgatctgtagtcgatttgcgggtcgtggtgtagatctgcgggctgtgatgaagttatttggtgtgatctgctcgcctgattctgcgggttggctcgagtagatatgatggttggaccggttggttcgtttaccgcgctagggttgggctgggatgatgttgcatgcgccgttgcgcgtgatcccgcagcaggacttgcgtttgattgccagatctcgttacgattatgtgatttggtttggactttttagatctgtagcttctgcttatgtgccagatgcgcctactgctcatatgcctgatgataatcataaatggctgtggaactaactagttgattgcggagtcatgtatcagctacaggtgtagggactagctacaggtgtagggacttgcgtctaattgtttggtcctttactcatgttgcaattatgcaatttagtttagattgtttgttccactcatctaggctgtaaaagggacactgcttagattgctgtttaatctttttagtagattatattatattggtaacttattacccctattacatgccatacgtgacttctgctcatgcctgatgataatcatagatcactgtggaattaattagttgattgttgaatcatgtttcatgtacataccacggcacaattgcttagttccttaacaaatgcaaattttactgatccatgtatgatttgcgtggttctctaatgtgaaatactatagctacttgttagtaagaatcaggttcgtatgcttaatgctgtatgtgccttctgctcatgcctgatgataatcatatatcactggaattaattagttgatcgtttaatcatatatcaagtacataccatgccacaatttttagtcacttaacccatgcagattgaactggtccctgcatgttttgctaaattgttctattctgattagaccatatatcatgtatttttttttggtaatggttctcttattttaaatgctatatagttctggtacttgttagaaagatctgcttcatagtttagttgcctatccctcgaattaggatgctgagcagctgatcctatagctttgtttcatgtatcaattcttttgtgttcaacagtcagtttttgttagattcattgtaacttatggtcgcttactcttctggtcctcaatgcttgcagggatcccctaaatagaccatgccgaagaagaagcgcaaggtcgggggcgggggctcaggcgggggcgggagcggcggcgggggctctgggggcggcggcagcggcgggggcggcagcgggggcggcgggtcgatgctgttccaggatttcactcatctgtaccctctctcaaagactgttcggttcgagctcaagcctattgggcggactctggagcacatccacgcgaagaacttcctcagccaggacgaaaccatggccgacatgtaccagaaggtcaaggtcatcctcgacgactaccacagggacttcatcgcggacatgatgggcgaggtgaagctgacgaagctcgccgagttctacgacgtctacctcaagttccgcaagaacccgaaggacgacggcctccagaagcagctcaaggacctgcaggccgtcctgaggaaggagtccgtcaagcccatcggcagcggcggcaagtacaagaccggctacgacaggctgttcggcgccaagctgttcaaggacggcaaggagctcggcgacctggcgaagttcgtgatcgcgcaggagggcgagagctcccccaagctggcccacctggcccacttcgagaagttcagcacgtacttcaccggcttccacgacaacaggaagaacatgtacagcgacgaggacaagcacacggccatcgcctaccgcctcatccacgagaacctgccccgcttcatcgacaacctgcagatcctgacgaccatcaagcagaagcactccgccctgtacgaccagatcatcaacgagctcaccgcgagcggcctcgacgtgtccctcgccagccacctcgacggctaccacaagctcctgacccaggagggcatcaccgcctacaaccgcatcatcggcgaggtgaacggctacaccaacaagcacaaccagatctgccacaagtccgagaggatcgccaagctcaggcccctgcacaagcagatcctcagcgacggcatgggcgtgagcttcctcccgtccaagttcgccgacgactccgagatgtgccaggccgtgaacgagttctacaggcactacaccgacgtgttcgccaaggtgcagtccctgttcgacggcttcgacgaccaccagaaggacggcatctacgtggagcacaagaacctgaacgagctgtccaagcaggccttcggcgacttcgccctcctgggccgcgtgctggacggctactacgtggacgtcgtgaacccggagttcaacgagcgcttcgcgaaggcgaagacggacaacgcgaaggccaagctcaccaaggagaaggacaagttcatcaagggcgtccacagcctcgcgtccctggagcaggcgatcgagcaccacaccgcgcgccacgacgacgagtccgtgcaggccggcaagctcggccagtacttcaagcacggcctggccggcgtcgacaacccgatccagaagatccacaacaaccactccaccatcaagggcttcctggagagggagcgcccggcgggcgagcgcgcgctccccaagatcaagtccggcaagaaccccgagatgacgcagctcaggcagctgaaggagctgctcgacaacgcgctcaacgtggcgcacttcgccaagctgctcacgaccaagaccacgctggacaaccaggacggcaacttctacggcgagttcggcgtcctgtacgacgagctggcgaagatcccgaccctgtacaacaaggtccgcgactacctgagccagaagcccttctccaccgagaagtacaagctcaacttcggcaacccgaccctcctgaacggctgggacctcaacaaggagaaggacaacttcggcgtgatcctccagaaggacggctgctactacctcgccctgctggacaaggcgcacaagaaggtcttcgacaacgccccgaacaccggcaagaacgtgtaccagaagatggtgtacaagctgctccccggccccaacaagatgctgccgaaggtgttcttcgcgaagtccaacctcgactactacaaccccagcgccgagctcctggacaagtacgccaagggcacgcacaagaagggcgacaacttcaacctcaaggactgccacgcgctgatcgacttcttcaaggcgggcatcaacaagcaccccgagtggcagcacttcggcttcaagttcagcccgacctccagctacagggacctcagcgacttctaccgcgaggtggagccccagggctaccaggtgaagttcgtcgacatcaacgccgactacatcgacgagctcgtcgagcagggcaagctctacctgttccagatctacaacaaggacttctccccgaaggcccacggcaagccgaacctccacacgctctacttcaaggccctcttcagcgaggacaacctggccgacccgatctacaagctcaacggcgaggcgcagatcttctaccgcaaggccagcctggacatgaacgaaacgaccatccacagggccggcgaggtcctggagaacaagaacccggacaacccgaagaagaggcagttcgtctacgacatcatcaaggacaagaggtacacccaggacaagttcatgctccacgtcccgatcaccatgaacttcggcgtccagggcatgaccatcaaggagttcaacaagaaggtcaaccagagcatccagcagtacgacgaggtgaacgtcatcggcatcgaccgcggcgagaggcacctgctctacctgacggtcatcaactccaagggcgagatcctcgagcagcgcagcctgaacgacatcacgaccgcgagcgccaacggcacgcaggtcaccacgccgtaccacaagatcctcgacaagcgcgagatcgagaggctgaacgcgcgcgtcggctggggcgagatcgaaacgatcaaggagctcaagtccggctacctcagccacgtcgtgcaccagatcaaccagctcatgctgaagtacaacgcgatcgtggtcctcgaggacctgaacttcggcttcaagaggggccgcttcaaggtggagaagcagatctaccagaacttcgagaacgccctgatcaagaagctcaaccacctggtcctcaaggacaaggcggacgacgagatcggcagctacaagaacgcgctccagctgaccaacaacttcacggacctcaagtccatcggcaagcagacgggcttcctgttctacgtgccggcgtggaacacctccaagatcgacccggaaaccggcttcgtcgacctgctcaagccgcgctacgagaacatcgcgcagtcccaggcgttcttcggcaagttcgacaagatctgctacaacaccgacaagggctacttcgagttccacatcgactacgcgaagttcaccgacaaggccaagaactccaggcagaagtgggccatctgcagccacggcgacaagcgctacgtgtacgacaagacggcgaaccagaacaagggcgcggccaagggcatcaacgtgaacgacgagctgaagtccctcttcgcgcgctaccacatcaacgacaagcagccgaacctcgtcatggacatctgccagaacaacgacaaggagttccacaagagcctgatgtgcctgctcaagaccctgctcgccctccgctactccaacgcgagctccgacgaggacttcatcctcagccccgtcgcgaacgacgagggcgtgttcttcaactccgccctcgcggacgacacgcagccgcagaacgccgacgcgaacggcgcctaccacatcgccctcaagggcctgtggctgctcaacgagctcaagaactccgacgacctgaacaaggtgaagctcgccattgacaaccagacgtggctgaatttcgctcagaatagggggggcgggggctcaggcgggggcgggagcggcggcgggggctctgggggcggcggcagcggcgggggcggcagcgggggcggcgggtcgccgaagaagaagcgcaaggtgtccggcggcagctccggcggcagcccgaagaagaagcgcaaagtgtgagggacccgatcgttcaaacatttggcaataaagtttcttaagattgaatcctgttgccggtcttgcgatgattatcatataatttctgttgaattacgttaagcatgtaataattaacatgtaatgcatgacgttatttatgagatgggtttttatgattagagtcccgcaattatacatttaatacgcgatagaaaacaaaatatagcgcgcaaactaggataaattatcgcgcgcggtgtcatctatgttactagatcggtaccgaattcattatgtggtctaggtaggttctatatataagaaaacttgaaatgttctaaaaaaaaattcaagcccatgcatgattgaagcaaacggtatagcaacggtgttaacctgatctagtgatctcttgcaatccttaacggccacctaccgcaggtagcaaacggcgtccccctcctcgatatctccgcggcgacctctggctttttccgcggaattgcgcggtggggacggattccacgagaccgcgacgcaaccgcctctcgccgctgggccccacaccgctcggtgccgtagcctcacgggactctttctccctcctcccccgttataaattggcttcatcccctccttgcctcatccatccaaatcccagtccccaatcccatcccttcgtaggagaaattcatcgaagctaagcgaatcctcgcgatcctctcaaggtactgcgagttttcgatccccctctcgacccctcgtatgtttgtgtttgtcgtagcgtttgattaggtatgctttccctgtttgtgttcgtcgtagcgtttgattaggtatgctttccctgttcgtgttcatcgtagtgtttgattaggtcgtgtgaggcgatggcctgctcgcgtccttcgatctgtagtcgatttgcgggtcgtggtgtagatctgcgggctgtgatgaagttatttggtgtgatctgctcgcctgattctgcgggttggctcgagtagatatgatggttggaccggttggttcgtttaccgcgctagggttgggctgggatgatgttgcatgcgccgttgcgcgtgatcccgcagcaggacttgcgtttgattgccagatctcgttacgattatgtgatttggtttggactttttagatctgtagcttctgcttatgtgccagatgcgcctactgctcatatgcctgatgataatcataaatggctgtggaactaactagttgattgcggagtcatgtatcagctacaggtgtagggactagctacaggtgtagggacttgcgtctaattgtttggtcctttactcatgttgcaattatgcaatttagtttagattgtttgttccactcatctaggctgtaaaagggacactgcttagattgctgtttaatctttttagtagattatattatattggtaacttattacccctattacatgccatacgtgacttctgctcatgcctgatgataatcatagatcactgtggaattaattagttgattgttgaatcatgtttcatgtacataccacggcacaattgcttagttccttaacaaatgcaaattttactgatccatgtatgatttgcgtggttctctaatgtgaaatactatagctacttgttagtaagaatcaggttcgtatgcttaatgctgtatgtgccttctgctcatgcctgatgataatcatatatcactggaattaattagttgatcgtttaatcatatatcaagtacataccatgccacaatttttagtcacttaacccatgcagattgaactggtccctgcatgttttgctaaattgttctattctgattagaccatatatcatgtatttttttttggtaatggttctcttattttaaatgctatatagttctggtacttgttagaaagatctgcttcatagtttagttgcctatccctcgaattaggatgctgagcagctgatcctatagctttgtttcatgtatcaattcttttgtgttcaacagtcagtttttgttagattcattgtaacttatggtcgcttactcttctggtcctcaatgcttgcagaagcttgaaattctgatgagtccgtgaggacgaaacgagtaagctcgtcaatttctactgtttgtagatgggaaagaccgaggagaagatctaatttctactgtttgtagatgcaccaaggaaggggaggagatcaatttctactgtttgtagatgtcacagatcacaaacttcaaatgaatttctactgtttgtagatacgcccagaaagcatacgcagtcggccggcatggtcccagcctcctcgctggcgccggctgggcaacatgcttcggcatggcgaatgggacgatcgttcaaacatttggcaataaagtttcttaagattgaatcctgttgccggtcttgcgatgattatcatataatttctgttgaattacgttaagcatgtaataattaacatgtaatgcatgacgttatttatgagatgggtttttatgattagagtcccgcaattatacatttaatacgcgatagaaaacaaaatatagcgcgcaaactaggataaattatcgcgcgcggtgtcatctatgttactagatccctaggctgcagtgcagcgtgacccggtcgtgcccctctctagagataatgagcattgcatgtctaagttataaaaaattaccacatattttttttgtcacacttgtttgaagtgcagtttatctatctttatacatatatttaaactttactctacgaataatataatctatagtactacaataatatcagtgttttagagaatcatataaatgaacagttagacatggtctaaaggacaattgagtattttgacaacaggactctacagttttatctttttagtgtgcatgtgttctcctttttttttgcaaatagcttcacctatataatacttcatccattttattagtacatccatttagggtttagggttaatggtttttatagactaatttttttagtacatctattttattctattttagcctctaaattaagaaaactaaaactctattttagtttttttatttaataatttagatataaaatagaataaaataaagtgactaaaaattaaacaaataccctttaagaaattaaaaaaactaaggaaacatttttcttgtttcgagtagataatgccagcctgttaaacgccgtcgacgagtctaacggacaccaaccagcgaaccagcagcgtcgcgtcgggccaagcgaagcagacggcacggcatctctgtcgctgcctctggacccctctcgagagttccgctccaccgttggacttgctccgctgtcggcatccagaaattgcgtggcggagcggcagacgtgagccggcacggcaggcggcctcctcctcctctcacggcaccggcagctacgggggattcctttcccaccgctccttcgctttcccttcctcgcccgccgtaataaatagacaccccctccacaccctctttccccaacctcgtgttgttcggagcgcacacacacacaaccagatctcccccaaatccacccgtcggcacctccgcttcaaggtacgccgctcgtcctccccccccccccctctctaccttctctagatcggcgttccggtccatggttagggcccggtagttctacttctgttcatgtttgtgttagatccgtgtttgtgttagatccgtgctgctagcgttcgtacacggatgcgacctgtacgtcagacacgttctgattgctaacttgccagtgtttctctttggggaatcctgggatggctctagccgttccgcagacgggatcgatttcatgattttttttgtttcgttgcatagggtttggtttgcccttttcctttatttcaatatatgccgtgcacttgtttgtcgggtcatcttttcatgcttttttttgtcttggttgtgatgatgtggtctggttgggcggtcgttctagatcggagtagaattctgtttcaaactacctggtggatttattaattttggatctgtatgtgtgtgccatacatattcatagttacgaattgaagatgatggatggaaatatcgatctaggataggtatacatgttgatgcgggttttactgatgcatatacagagatgctttttgttcgcttggttgtgatgatgtggtgtggttgggcggtcgttcattcgttctagatcggagtagaatactgtttcaaactacctggtgtatttattaattttggaactgtatgtgtgtgtcatacatcttcatagttacgagtttaagatggatggaaatatcgatctaggataggtatacatgttgatgtgggttttactgatgcatatacatgatggcatatgcagcatctattcatatgctctaaccttgagtacctatctattataataaacaagtatgttttataattattttgatcttgatatacttggatgatggcatatgcagcagctatatgtggatttttttagccctgccttcatacgctatttatttgcttggtactgtttcttttgtcgatgctcaccctgttgtttggtgttacttctgcagggatcaccgatcatgcaaaaactcattaactcagtgcaaaactatgcctggggcagcaaaacggcgttgactgaactttatggtatggaaaatccgtccagccagccgatggccgagctgtggatgggcgcacatccgaaaagcagttcacgagtgcagaatgccgccggagatatcgtttcactgcgtgatgtgattgagagtgataaatcgactctgctcggagaggccgttgccaaacgctttggcgaactgcctttcctgttcaaagtattatgcgcagcacagccactctccattcaggttcatccaaacaaacacaattctgaaatcggttttgccaaagaaaatgccgcaggtatcccgatggatgccgccgagcgtaactataaagatcctaaccacaagccggagctggtttttgcgctgacgcctttccttgcgatgaacgcgtttcgtgaattttccgagattgtctccctactccagccggtcgcaggtgcacatccggcgattgctcactttttacaacagcctgatgccgaacgtttaagcgaactgttcgccagcctgttgaatatgcagggtgaagaaaaatcccgcgcgctggcgattttaaaatcggccctcgatagccagcagggtgaaccgtggcaaacgattcgtttaatttctgaattttacccggaagacagcggtctgttctccccgctattgctgaatgtggtgaaattgaaccctggcgaagcgatgttcctgttcgctgaaacaccgcacgcttacctgcaaggcgtggcgctggaagtgatggcaaactccgataacgtgctgcgtgcgggtctgacgcctaaatacattgatattccggaactggttgccaatgtgaaattcgaagccaaaccggctaaccagttgttgacccagccggtgaaacaaggtgcagaactggacttcccgattccagtggatgattttgccttctcgctgcatgaccttagtgataaagaaaccaccattagccagcagagtgccgccattttgttctgcgtcgaaggcgatgcaacgttgtggaaaggttctcagcagttacagcttaaaccgggtgaatcagcgtttattgccgccaacgaatcaccggtgactgtcaaaggccacggccgtttagcgcgtgtttacaacaagctgtaagagcttactgaaaaaattaacatctcttgctaagctgggagctcgatccgtcgacctgcagatcgttcaaacatttggcaataaagtttcttaagattgaatcctgttgccggtcttgcgatgattatcatataatttctgttgaattacgttaagcatgtaataattaacatgtaatgcatgacgttatttatgagatgggtttttatgattagagtcccgcaattatacatttaatacgcgatagaaaacaaaatatagcgcgcaaactaggataaattatcgcgcgcggtgtcatctatgttactagatccggaccgcctgcaggcccgggggcgcgccctaattagctaacggccaggatcgccgcgtgagcctttagcaactagctagattaattaacgcaatctgttattaagttgtctaagcgtcaatttgtttacaccacaatatatcctgccaccagccagccaacagctccccgaccggcagctcggcacaaaatcaccactcgatacaggcagcccatcagaattaattctcatgtttgacagcttatcatcgactgcacggtgcaccaatgcttctggcgtcaggcagccatcggaagctgtggtatggctgtgcaggtcgtaaatcactgcataattcgtgtcgctcaaggcgcactcccgttctggataatgttttttgcgccgacatcataacggttctggcaaatattctgaaatgagctgttgacaattaatcatccggctcgtataatgtgtggaattgtgagcggataacaatttcacacaggaaacagaccatgagggaagcgttgatcgccgaagtatcgactcaactatcagaggtagttggcgtcatcgagcgccatctcgaaccgacgttgctggccgtacatttgtacggctccgcagtggatggcggcctgaagccacacagtgatattgatttgctggttacggtgaccgtaaggcttgatgaaacaacgcggcgagctttgatcaacgaccttttggaaacttcggcttcccctggagagagcgagattctccgcgctgtagaagtcaccattgttgtgcacgacgacatcattccgtggcgttatccagctaagcgcgaactgcaatttggagaatggcagcgcaatgacattcttgcaggtatcttcgagccagccacgatcgacattgatctggctatcttgctgacaaaagcaagagaacatagcgttgccttggtaggtccagcggcggaggaactctttgatccggttcctgaacaggatctatttgaggcgctaaatgaaaccttaacgctatggaactcgccgcccgactgggctggcgatgagcgaaatgtagtgcttacgttgtcccgcatttggtacagcgcagtaaccggcaaaatcgcgccgaaggatgtcgctgccgactgggcaatggagcgcctgccggcccagtatcagcccgtcatacttgaagctaggcaggcttatcttggacaagaagatcgcttggcctcgcgcgcagatcagttggaagaatttgttcactacgtgaaaggcgagatcaccaaagtagtcggcaaataaagctctagtggatctccgtacccagggatctggctcgcggcggacgcacgacgccggggcgagaccataggcgatctcctaaatcaatagtagctgtaacctcgaagcgtttcacttgtaacaacgattgagaatttttgtcataaaattgaaatacttggttcgcatttttgtcatccgcggtcagccgcaattctgacgaactgcccatttagctggagatgattgtacatccttcacgtgaaaatttctcaagcgctgtgaacaagggttcagattttagattgaaaggtgagccgttgaaacacgttcttcttgtcgatgacgacgtcgctatgcggcatcttattattgaataccttacgatccacgccttcaaagtgaccgcggtagccgacagcacccagttcacaagagtactctcttccgcgacggtcgatgtcgtggttgttgatctagatttaggtcgtgaagatgggctcgagatcgttcgtaatctggcggcaaagtctgatattccaatcataattatcagtggcgaccgccttgaggagacggataaagttgttgcactcgagctaggagcaagtgattttatcgctaagccgttcagtatcagagagtttctagcacgcattcgggttgccttgcgcgtgcgccccaacgttgtccgctccaaagaccgacggtctttttgttttactgactggacacttaatctcaggcaacgtcgcttgatgtccgaagctggcggtgaggtgaaacttacggcaggtgagttcaatcttctcctcgcgtttttagagaaaccccgcgacgttctatcgcgcgagcaacttctcattgccagtcgagtacgcgacgaggaggtttatgacaggagtatagatgttctcattttgaggctgcgccgcaaacttgaggcagatccgtcaagccctcaactgataaaaacagcaagaggtgccggttatttctttgacgcggacgtgcaggtttcgcacggggggacgatggcagcctgagccaattcccagatccccgaggaatcggcgtgagcggtcgcaaaccatccggcccggtacaaatcggcgcggcgctgggtgatgacctggtggagaagttgaaggccgcgcaggccgcccagcggcaacgcatcgaggcagaagcacgccccggtgaatcgtggcaagcggccgctgatcgaatccgcaaagaatcccggcaaccgccggcagccggtgcgccgtcgattaggaagccgcccaagggcgacgagcaaccagattttttcgttccgatgctctatgacgtgggcacccgcgatagtcgcagcatcatggacgtggccgttttccgtctgtcgaagcgtgaccgacgagctggcgaggtgatccgctacgagcttccagacgggcacgtagaggtttccgcagggccggccggcatggccagtgtgtgggattacgacctggtactgatggcggtttcccatctaaccgaatccatgaaccgataccgggaagggaagggagacaagcccggccgcgtgttccgtccacacgttgcggacgtactcaagttctgccggcgagccgatggcggaaagcagaaagacgacctggtagaaacctgcattcggttaaacaccacgcacgttgccatgcagcgtacgaagaaggccaagaacggccgcctggtgacggtatccgagggtgaagccttgattagccgctacaagatcgtaaagagcgaaaccgggcggccggagtacatcgagatcgagctggctgattggatgtaccgcgagatcacagaaggcaagaacccggacgtgctgacggttcaccccgattactttttgatcgatcccggcatcggccgttttctctaccgcctggcacgccgcgccgcaggcaaggcagaagccagatggttgttcaagacgatctacgaacgcagtggcagcgccggagagttcaagaagttctgtttcaccgtgcgcaagctgatcgggtcaaatgacctgccggagtacgatttgaaggaggaggcggggcaggctggcccgatcctagtcatgcgctaccgcaacctgatcgagggcgaagcatccgccggttcctaatgtacggagcagatgctagggcaaattgccctagcaggggaaaaaggtcgaaaaggtctctttcctgtggatagcacgtacattgggaacccaaagccgtacattgggaaccggaacccgtacattgggaacccaaagccgtacattgggaaccggtcacacatgtaagtgactgatataaaagagaaaaaaggcgatttttccgcctaaaactctttaaaacttattaaaactcttaaaacccgcctggcctgtgcataactgtctggccagcgcacagccgaagagctgcaaaaagcgcctacccttcggtcgctgcgctccctacgccccgccgcttcgcgtcggcctatcgcggccgctggccgctcaaaaatggctggcctacggccaggcaatctaccagggcgcggacaagccgcgccgtcgccactcgaccgccggcgctgaggtctgcctcgtgaagaaggtgttgctgactcataccaggcctgaatcgccccatcatccagccagaaagtgagggagccacggttgatgagagctttgttgtaggtggaccagttggtgattttgaacttttgctttgccacggaacggtctgcgttgtcgggaagatgcgtgatctgatccttcaactcagcaaaagttcgatttattcaacaaagccgccgtcccgtcaagtcagcgtaatgctctgccagtgttacaaccaattaaccaattctgattagaaaaactcatcgagcatcaaatgaaactgcaatttattcatatcaggattatcaataccatatttttgaaaaagccgtttctgtaatgaaggagaaaactcaccgaggcagttccataggatggcaagatcctggtatcggtctgcgattccgactcgtccaacatcaatacaacctattaatttcccctcgtcaaaaataaggttatcaagtgagaaatcaccatgagtgacgactgaatccggtgagaatggcaaaagctctgcattaatgaatcggccaacgcgcggggagaggcggtttgcgtattgggcgctcttccgcttcctcgctcactgactcgctgcgctcggtcgttcggctgcggcgagcggtatcagctcactcaaaggcggtaatacggttatccacagaatcaggggataacgcaggaaagaacatgtgagcaaaaggccagcaaaaggccaggaaccgtaaaaaggccgcgttgctggcgtttttccataggctccgcccccctgacgagcatcacaaaaatcgacgctcaagtcagaggtggcgaaacccgacaggactataaagataccaggcgtttccccctggaagctccctcgtgcgctctcctgttccgaccctgccgcttaccggatacctgtccgcctttctcccttcgggaagcgtggcgctttctcatagctcacgctgtaggtatctcagttcggtgtaggtcgttcgctccaagctgggctgtgtgcacgaaccccccgttcagcccgaccgctgcgccttatccggtaactatcgtcttgagtccaacccggtaagacacgacttatcgccactggcagcagccactggtaacaggattagcagagcgaggtatgtaggcggtgctacagagttcttgaagtggtggcctaactacggctacactagaagaacagtatttggtatctgcgctctgctgaagccagttaccttcggaaaaagagttggtagctcttgatccggcaaacaaaccaccgctggtagcggtggtttttttgtttgcaagcagcagattacgcgcagaaaaaaaggatctcaagaagatcctttgatcttttctacggggtctgacgctcagtggaacgaaaactcacgttaagggattttggtcatgagattatcaaaaaggatcttcacctagatccttttgatccggaatta

SEQ ID NO: 16 - DNA, 17531 bp, synthetic construct
  source 1..17531: mol_type = other DNA
attcctgtggttggcatgcacatacaaatggacgaacggataaaccttttcacgcccttttaaatatccgattattctaataaacgctcttttctcttaggtttacccgccaatatatcctgtcaaacactgatagtttaaactggcactagcctaacggtgttgactaactaggccgcttccctaattagctaacccgggggcgcgccgggaccggaattcattatgtggtctaggtaggttctatatataagaaaacttgaaatgttctaaaaaaaaattcaagcccatgcatgattgaagcaaacggtatagcaacggtgttaacctgatctagtgatctcttgcaatccttaacggccacctaccgcaggtagcaaacggcgtccccctcctcgatatctccgcggcgacctctggctttttccgcggaattgcgcggtggggacggattccacgagaccgcgacgcaaccgcctctcgccgctgggccccacaccgctcggtgccgtagcctcacgggactctttctccctcctcccccgttataaattggcttcatcccctccttgcctcatccatccaaatcccagtccccaatcccatcccttcgtaggagaaattcatcgaagctaagcgaatcctcgcgatcctctcaaggtactgcgagttttcgatccccctctcgacccctcgtatgtttgtgtttgtcgtagcgtttgattaggtatgctttccctgtttgtgttcgtcgtagcgtttgattaggtatgctttccctgttcgtgttcatcgtagtgtttgattaggtcgtgtgaggcgatggcctgctcgcgtccttcgatctgtagtcgatttgcgggtcgtggtgtagatctgcgggctgtgatgaagttatttggtgtgatctgctcgcctgattctgcgggttggctcgagtagatatgatggttggaccggttggttcgtttaccgcgctagggttgggctgggatgatgttgcatgcgccgttgcgcgtgatcccgcagcaggacttgcgtttgattgccagatctcgttacgattatgtgatttggtttggactttttagatctgtagcttctgcttatgtgccagatgcgcctactgctcatatgcctgatgataatcataaatggctgtggaactaactagttgattgcggagtcatgtatcagctacaggtgtagggactagctacaggtgtagggacttgcgtctaattgtttggtcctttactcatgttgcaattatgcaatttagtttagattgtttgttccactcatctaggctgtaaaagggacactgcttagattgctgtttaatctttttagtagattatattatattggtaacttattacccctattacatgccatacgtgacttctgctcatgcctgatgataatcatagatcactgtggaattaattagttgattgttgaatcatgtttcatgtacataccacggcacaattgcttagttccttaacaaatgcaaattttactgatccatgtatgatttgcgtggttctctaatgtgaaatactatagctacttgttagtaagaatcaggttcgtatgcttaatgctgtatgtgccttctgctcatgcctgatgataatcatatatcactggaattaattagttgatcgtttaatcatatatcaagtacataccatgccacaatttttagtcacttaacccatgcagattgaactggtccctgcatgttttgctaaattgttctattctgattagaccatatatcatgtatttttttttggtaatggttctcttattttaaatgctatatagttctggtacttgttagaaagatctgcttcatagtttagttgcctatccctcgaattaggatgctgagcagctgatcctatagctttgtttcatgtatcaattcttttgtgttcaacagtcagtttttgttagattcattgtaacttatggtcgcttactcttctggtcctcaatgcttgcagggatcccctaaatagaccatgccgaagaagaagcgcaaggtcgggggcgggggctcaggcgggggcgggagcggcggcgggggctctgggggcggcggcagcggcgggggcggcagcgggggcggcgggtcgatgctgttccaggatttcactcatctgtaccctctctcaaagactgttcggttcgagctcaagcctattgggcggactctggagcacatccacgcgaagaacttcctcagccaggacgaaaccatggccgacatgtaccagaaggtcaaggtcatcctcgacgactaccacagggacttcatcgcggacatgatgggcgaggtgaagctgacgaagctcgccgagttctacgacgtctacctcaagttccgcaagaacccgaaggacgacggcctccagaagcagctcaaggacctgcaggccgtcctgaggaaggagtccgtcaagcccatcggcagcggcggcaagtacaagaccggctacgacaggctgttcggcgccaagctgttcaaggacggcaaggagctcggcgacctggcgaagttcgtgatcgcgcaggagggcgagagctcccccaagctggcccacctggcccacttcgagaagttcagcacgtacttcaccggcttccacaggaacaggaagaacatgtacagcgacgaggacaagcacacggccatcgcctaccgcctcatccacgagaacctgccccgcttcatcgacaacctgcagatcctgacgaccatcaagcagaagcactccgccctgtacgaccagatcatcaacgagctcaccgcgagcggcctcgacgtgtccctcgccagccacctcgacggctaccacaagctcctgacccaggagggcatcaccgcctacaaccgcatcatcggcgaggtgaacggctacaccaacaagcacaaccagatctgccacaagtccgagaggatcgccaagctcaggcccctgcacaagcagatcctcagcgacggcatgggcgtgagcttcctcccgtccaagttcgccgacgactccgagatgtgccaggccgtgaacgagttctacaggcactacaccgacgtgttcgccaaggtgcagtccctgttcgacggcttcgacgaccaccagaaggacggcatctacgtggagcacaagaacctgaacgagctgtccaagcaggccttcggcgacttcgccctcctgggccgcgtgctggacggctactacgtggacgtcgtgaacccggagttcaacgagcgcttcgcgaaggcgaagacggacaacgcgaaggccaagctcaccaaggagaaggacaagttcatcaagggcgtccacagcctcgcgtccctggagcaggcgatcgagcaccacaccgcgcgccacgacgacgagtccgtgcaggccggcaagctcggccagtacttcaagcacggcctggccggcgtcgacaacccgatccagaagatccacaacaaccactccaccatcaagggcttcctggagagggagcgcccggcgggcgagcgcgcgctccccaagatcaagtccggcaagaaccccgagatgacgcagctcaggcagctgaaggagctgctcgacaacgcgctcaacgtggcgcacttcgccaagctgctcacgaccaagaccacgctggacaaccaggacggcaacttctacggcgagttcggcgtcctgtacgacgagctggcgaagatcccgaccctgtacaacaaggtccgcgactacctgagccagaagcccttctccaccgagaagtacaagctcaacttcggcaacccgaccctcctgaacggctgggacctcaacaaggagaaggacaacttcggcgtgatcctccagaaggacggctgctactacctcgccctgctggacaaggcgcacaagaaggtcttcgacaacgccccgaacaccggcaagaacgtgtaccagaagatggtgtacaagctgctccccggccccaacaagatgctgccgaaggtgttcttcgcgaagtccaacctcgactactacaaccccagcgccgagctcctggacaagtacgccaagggcacgcacaagaagggcgacaacttcaacctcaaggactgccacgcgctgatcgacttcttcaaggcgggcatcaacaagcaccccgagtggcagcacttcggcttcaagttcagcccgacctccagctacagggacctcagcgacttctaccgcgaggtggagccccagggctaccaggtgaagttcgtcgacatcaacgccgactacatcgacgagctcgtcgagcagggcaagctctacctgttccagatctacaacaaggacttctccccgaaggcccacggcaagccgaacctccacacgctctacttcaaggccctcttcagcgaggacaacctggccgacccgatctacaagctcaacggcgaggcgcagatcttctaccgcaaggccagcctggacatgaacgaaacgaccatccacagggccggcgaggtcctggagaacaagaacccggacaacccgaagaagaggcagttcgtctacgacatcatcaaggacaagaggtacacccaggacaagttcatgctccacgtcccgatcaccatgaacttcggcgtccagggcatgaccatcaaggagttcaacaagaaggtcaaccagagcatccagcagtacgacgaggtgaacgtcatcggcatcgaccgcggcgagaggcacctgctctacctgacggtcatcaactccaagggcgagatcctcgagcagcgcagcctgaacgacatcacgaccgcgagcgccaacggcacgcaggtcaccacgccgtaccacaagatcctcgacaagcgcgagatcgagaggctgaacgcgcgcgtcggctggggcgagatcgaaacgatcaaggagctcaagtccggctacctcagccacgtcgtgcaccagatcaaccagctcatgctgaagtacaacgcgatcgtggtcctcgaggacctgaacttcggcttcaagaggggccgcttcaaggtggagaagcagatctaccagaacttcgagaacgccctgatcaagaagctcaaccacctggtcctcaaggacaaggcggacgacgagatcggcagctacaagaacgcgctccagctgaccaacaacttcacggacctcaagtccatcggcaagcagacgggcttcctgttctacgtgccggcgtggaacacctccaagatcgacccggaaaccggcttcgtcgacctgctcaagccgcgctacgagaacatcgcgcagtcccaggcgttcttcggcaagttcgacaagatctgctacaacaccgacaagggctacttcgagttccacatcgactacgcgaagttcaccgacaaggccaagaactccaggcagaagtgggccatctgcagccacggcgacaagcgctacgtgtacgacaagacggcgaaccagaacaagggcgcggccaagggcatcaacgtgaacgacgagctgaagtccctcttcgcgcgctaccacatcaacgacaagcagccgaacctcgtcatggacatctgccagaacaacgacaaggagttccacaagagcctgatgtgcctgctcaagaccctgctcgccctccgctactccaacgcgagctccgacgaggacttcatcctcagccccgtcgcgaacgacgagggcgtgttcttcaactccgccctcgcggacgacacgcagccgcagaacgccgacgcgaacggcgcctaccacatcgccctcaagggcctgtggctgctcaacgagctcaagaactccgacgacctgaacaaggtgaagctcgccattgacaaccagacgtggctgaatttcgctcagaatagggggggcgggggctcaggcgggggcgggagcggcggcgggggctctgggggcggcggcagcggcgggggcggcagcgggggcggcgggtcgccgaagaagaagcgcaaggtgtccggcggcagctccggcggcagcccgaagaagaagcgcaaagtgtgagggacccgatcgttcaaacatttggcaataaagtttcttaagattgaatcctgttgccggtcttgcgatgattatcatataatttctgttgaattacgttaagcatgtaataattaacatgtaatgcatgacgttatttatgagatgggtttttatgattagagtcccgcaattatacatttaatacgcgatagaaaacaaaatatagcgcgcaaactaggataaattatcgcgcgcggtgtcatctatgttactagatcggtaccgaattcattatgtggtctaggtaggttctatatataagaaaacttgaaatgttctaaaaaaaaattcaagcccatgcatgattgaagcaaacggtatagcaacggtgttaacctgatctagtgatctcttgcaatccttaacggccacctaccgcaggtagcaaacggcgtccccctcctcgatatctccgcggcgacctctggctttttccgcggaattgcgcggtggggacggattccacgagaccgcgacgcaaccgcctctcgccgctgggccccacaccgctcggtgccgtagcctcacgggactctttctccctcctcccccgttataaattggcttcatcccctccttgcctcatccatccaaatcccagtccccaatcccatcccttcgtaggagaaattcatcgaagctaagcgaatcctcgcgatcctctcaaggtactgcgagttttcgatccccctctcgacccctcgtatgtttgtgtttgtcgtagcgtttgattaggtatgctttccctgtttgtgttcgtcgtagcgtttgattaggtatgctttccctgttcgtgttcatcgtagtgtttgattaggtcgtgtgaggcgatggcctgctcgcgtccttcgatctgtagtcgatttgcgggtcgtggtgtagatctgcgggctgtgatgaagttatttggtgtgatctgctcgcctgattctgcgggttggctcgagtagatatgatggttggaccggttggttcgtttaccgcgctagggttgggctgggatgatgttgcatgcgccgttgcgcgtgatcccgcagcaggacttgcgtttgattgccagatctcgttacgattatgtgatttggtttggactttttagatctgtagcttctgcttatgtgccagatgcgcctactgctcatatgcctgatgataatcataaatggctgtggaactaactagttgattgcggagtcatgtatcagctacaggtgtagggactagctacaggtgtagggacttgcgtctaattgtttggtcctttactcatgttgcaattatgcaatttagtttagattgtttgttccactcatctaggctgtaaaagggacactgcttagattgctgtttaatctttttagtagattatattatattggtaacttattacccctattacatgccatacgtgacttctgctcatgcctgatgataatcatagatcactgtggaattaattagttgattgttgaatcatgtttcatgtacataccacggcacaattgcttagttccttaacaaatgcaaattttactgatccatgtatgatttgcgtggttctctaatgtgaaatactatagctacttgttagtaagaatcaggttcgtatgcttaatgctgtatgtgccttctgctcatgcctgatgataatcatatatcactggaattaattagttgatcgtttaatcatatatcaagtacataccatgccacaatttttagtcacttaacccatgcagattgaactggtccctgcatgttttgctaaattgttctattctgattagaccatatatcatgtatttttttttggtaatggttctcttattttaaatgctatatagttctggtacttgttagaaagatctgcttcatagtttagttgcctatccctcgaattaggatgctgagcagctgatcctatagctttgtttcatgtatcaattcttttgtgttcaacagtcagtttttgttagattcattgtaacttatggtcgcttactcttctggtcctcaatgcttgcagaagcttgaaattctgatgagtccgtgaggacgaaacgagtaagctcgtcaatttctactgtttgtagatgggaaagaccgaggagaagatctaatttctactgtttgtagatgcaccaaggaaggggaggagatcaatttctactgtttgtagatgtcacagatcacaaacttcaaatgaatttctactgtttgtagatacgcccagaaagcatacgcagtcggccggcatggtcccagcctcctcgctggcgccggctgggcaacatgcttcggcatggcgaatgggacgatcgttcaaacatttggcaataaagtttcttaagattgaatcctgttgccggtcttgcgatgattatcatataatttctgttgaattacgttaagcatgtaataattaacatgtaatgcatgacgttatttatgagatgggtttttatgattagagtcccgcaattatacatttaatacgcgatagaaaacaaaatatagcgcgcaaactaggataaattatcgcgcgcggtgtcatctatgttactagatccctaggctgcagtgcagcgtgacccggtcgtgcccctctctagagataatgagcattgcatgtctaagttataaaaaattaccacatattttttttgtcacacttgtttgaagtgcagtttatctatctttatacatatatttaaactttactctacgaataatataatctatagtactacaataatatcagtgttttagagaatcatataaatgaacagttagacatggtctaaaggacaattgagtattttgacaacaggactctacagttttatctttttagtgtgcatgtgttctcctttttttttgcaaatagcttcacctatataatacttcatccattttattagtacatccatttagggtttagggttaatggtttttatagactaatttttttagtacatctattttattctattttagcctctaaattaagaaaactaaaactctattttagtttttttatttaataatttagatataaaatagaataaaataaagtgactaaaaattaaacaaataccctttaagaaattaaaaaaactaaggaaacatttttcttgtttcgagtagataatgccagcctgttaaacgccgtcgacgagtctaacggacaccaaccagcgaaccagcagcgtcgcgtcgggccaagcgaagcagacggcacggcatctctgtcgctgcctctggacccctctcgagagttccgctccaccgttggacttgctccgctgtcggcatccagaaattgcgtggcggagcggcagacgtgagccggcacggcaggcggcctcctcctcctctcacggcaccggcagctacgggggattcctttcccaccgctccttcgctttcccttcctcgcccgccgtaataaatagacaccccctccacaccctctttccccaacctcgtgttgttcggagcgcacacacacacaaccagatctcccccaaatccacccgtcggcacctccgcttcaaggtacgccgctcgtcctccccccccccccctctctaccttctctagatcggcgttccggtccatggttagggcccggtagttctacttctgttcatgtttgtgttagatccgtgtttgtgttagatccgtgctgctagcgttcgtacacggatgcgacctgtacgtcagacacgttctgattgctaacttgccagtgtttctctttggggaatcctgggatggctctagccgttccgcagacgggatcgatttcatgattttttttgtttcgttgcatagggtttggtttgcccttttcctttatttcaatatatgccgtgcacttgtttgtcgggtcatcttttcatgcttttttttgtcttggttgtgatgatgtggtctggttgggcggtcgttctagatcggagtagaattctgtttcaaactacctggtggatttattaattttggatctgtatgtgtgtgccatacatattcatagttacgaattgaagatgatggatggaaatatcgatctaggataggtatacatgttgatgcgggttttactgatgcatatacagagatgctttttgttcgcttggttgtgatgatgtggtgtggttgggcggtcgttcattcgttctagatcggagtagaatactgtttcaaactacctggtgtatttattaattttggaactgtatgtgtgtgtcatacatcttcatagttacgagtttaagatggatggaaatatcgatctaggataggtatacatgttgatgtgggttttactgatgcatatacatgatggcatatgcagcatctattcatatgctctaaccttgagtacctatctattataataaacaagtatgttttataattattttgatcttgatatacttggatgatggcatatgcagcagctatatgtggatttttttagccctgccttcatacgctatttatttgcttggtactgtttcttttgtcgatgctcaccctgttgtttggtgttacttctgcagggatcaccgatcatgcaaaaactcattaactcagtgcaaaactatgcctggggcagcaaaacggcgttgactgaactttatggtatggaaaatccgtccagccagccgatggccgagctgtggatgggcgcacatccgaaaagcagttcacgagtgcagaatgccgccggagatatcgtttcactgcgtgatgtgattgagagtgataaatcgactctgctcggagaggccgttgccaaacgctttggcgaactgcctttcctgttcaaagtattatgcgcagcacagccactctccattcaggttcatccaaacaaacacaattctgaaatcggttttgccaaagaaaatgccgcaggtatcccgatggatgccgccgagcgtaactataaagatcctaaccacaagccggagctggtttttgcgctgacgcctttccttgcgatgaacgcgtttcgtgaattttccgagattgtctccctactccagccggtcgcaggtgcacatccggcgattgctcactttttacaacagcctgatgccgaacgtttaagcgaactgttcgccagcctgttgaatatgcagggtgaagaaaaatcccgcgcgctggcgattttaaaatcggccctcgatagccagcagggtgaaccgtggcaaacgattcgtttaatttctgaattttacccggaagacagcggtctgttctccccgctattgctgaatgtggtgaaattgaaccctggcgaagcgatgttcctgttcgctgaaacaccgcacgcttacctgcaaggcgtggcgctggaagtgatggcaaactccgataacgtgctgcgtgcgggtctgacgcctaaatacattgatattccggaactggttgccaatgtgaaattcgaagccaaaccggctaaccagttgttgacccagccggtgaaacaaggtgcagaactggacttcccgattccagtggatgattttgccttctcgctgcatgaccttagtgataaagaaaccaccattagccagcagagtgccgccattttgttctgcgtcgaaggcgatgcaacgttgtggaaaggttctcagcagttacagcttaaaccgggtgaatcagcgtttattgccgccaacgaatcaccggtgactgtcaaaggccacggccgtttagcgcgtgtttacaacaagctgtaagagcttactgaaaaaattaacatctcttgctaagctgggagctcgatccgtcgacctgcagatcgttcaaacatttggcaataaagtttcttaagattgaatcctgttgccggtcttgcgatgattatcatataatttctgttgaattacgttaagcatgtaataattaacatgtaatgcatgacgttatttatgagatgggtttttatgattagagtcccgcaattatacatttaatacgcgatagaaaacaaaatatagcgcgcaaactaggataaattatcgcgcgcggtgtcatctatgttactagatccggaccgcctgcaggcccgggggcgcgccctaattagctaacggccaggatcgccgcgtgagcctttagcaactagctagattaattaacgcaatctgttattaagttgtctaagcgtcaatttgtttacaccacaatatatcctgccaccagccagccaacagctccccgaccggcagctcggcacaaaatcaccactcgatacaggcagcccatcagaattaattctcatgtttgacagcttatcatcgactgcacggtgcaccaatgcttctggcgtcaggcagccatcggaagctgtggtatggctgtgcaggtcgtaaatcactgcataattcgtgtcgctcaaggcgcactcccgttctggataatgttttttgcgccgacatcataacggttctggcaaatattctgaaatgagctgttgacaattaatcatccggctcgtataatgtgtggaattgtgagcggataacaatttcacacaggaaacagaccatgagggaagcgttgatcgccgaagtatcgactcaactatcagaggtagttggcgtcatcgagcgccatctcgaaccgacgttgctggccgtacatttgtacggctccgcagtggatggcggcctgaagccacacagtgatattgatttgctggttacggtgaccgtaaggcttgatgaaacaacgcggcgagctttgatcaacgaccttttggaaacttcggcttcccctggagagagcgagattctccgcgctgtagaagtcaccattgttgtgcacgacgacatcattccgtggcgttatccagctaagcgcgaactgcaatttggagaatggcagcgcaatgacattcttgcaggtatcttcgagccagccacgatcgacattgatctggctatcttgctgacaaaagcaagagaacatagcgttgccttggtaggtccagcggcggaggaactctttgatccggttcctgaacaggatctatttgaggcgctaaatgaaaccttaacgctatggaactcgccgcccgactgggctggcgatgagcgaaatgtagtgcttacgttgtcccgcatttggtacagcgcagtaaccggcaaaatcgcgccgaaggatgtcgctgccgactgggcaatggagcgcctgccggcccagtatcagcccgtcatacttgaagctaggcaggcttatcttggacaagaagatcgcttggcctcgcgcgcagatcagttggaagaatttgttcactacgtgaaaggcgagatcaccaaagtagtcggcaaataaagctctagtggatctccgtacccagggatctggctcgcggcggacgcacgacgccggggcgagaccataggcgatctcctaaatcaatagtagctgtaacctcgaagcgtttcacttgtaacaacgattgagaatttttgtcataaaattgaaatacttggttcgcatttttgtcatccgcggtcagccgcaattctgacgaactgcccatttagctggagatgattgtacatccttcacgtgaaaatttctcaagcgctgtgaacaagggttcagattttagattgaaaggtgagccgttgaaacacgttcttcttgtcgatgacgacgtcgctatgcggcatcttattattgaataccttacgatccacgccttcaaagtgaccgcggtagccgacagcacccagttcacaagagtactctcttccgcgacggtcgatgtcgtggttgttgatctagatttaggtcgtgaagatgggctcgagatcgttcgtaatctggcggcaaagtctgatattccaatcataattatcagtggcgaccgccttgaggagacggataaagttgttgcactcgagctaggagcaagtgattttatcgctaagccgttcagtatcagagagtttctagcacgcattcgggttgccttgcgcgtgcgccccaacgttgtccgctccaaagaccgacggtctttttgttttactgactggacacttaatctcaggcaacgtcgcttgatgtccgaagctggcggtgaggtgaaacttacggcaggtgagttcaatcttctcctcgcgtttttagagaaaccccgcgacgttctatcgcgcgagcaacttctcattgccagtcgagtacgcgacgaggaggtttatgacaggagtatagatgttctcattttgaggctgcgccgcaaacttgaggcagatccgtcaagccctcaactgataaaaacagcaagaggtgccggttatttctttgacgcggacgtgcaggtttcgcacggggggacgatggcagcctgagccaattcccagatccccgaggaatcggcgtgagcggtcgcaaaccatccggcccggtacaaatcggcgcggcgctgggtgatgacctggtggagaagttgaaggccgcgcaggccgcccagcggcaacgcatcgaggcagaagcacgccccggtgaatcgtggcaagcggccgctgatcgaatccgcaaagaatcccggcaaccgccggcagccggtgcgccgtcgattaggaagccgcccaagggcgacgagcaaccagattttttcgttccgatgctctatgacgtgggcacccgcgatagtcgcagcatcatggacgtggccgttttccgtctgtcgaagcgtgaccgacgagctggcgaggtgatccgctacgagcttccagacgggcacgtagaggtttccgcagggccggccggcatggccagtgtgtgggattacgacctggtactgatggcggtttcccatctaaccgaatccatgaaccgataccgggaagggaagggagacaagcccggccgcgtgttccgtccacacgttgcggacgtactcaagttctgccggcgagccgatggcggaaagcagaaagacgacctggtagaaacctgcattcggttaaacaccacgcacgttgccatgcagcgtacgaagaaggccaagaacggccgcctggtgacggtatccgagggtgaagccttgattagccgctacaagatcgtaaagagcgaaaccgggcggccggagtacatcgagatcgagctggctgattggatgtaccgcgagatcacagaaggcaagaacccggacgtgctgacggttcaccccgattactttttgatcgatcccggcatcggccgttttctctaccgcctggcacgccgcgccgcaggcaaggcagaagccagatggttgttcaagacgatctacgaacgcagtggcagcgccggagagttcaagaagttctgtttcaccgtgcgcaagctgatcgggtcaaatgacctgccggagtacgatttgaaggaggaggcggggcaggctggcccgatcctagtcatgcgctaccgcaacctgatcgagggcgaagcatccgccggttcctaatgtacggagcagatgctagggcaaattgccctagcaggggaaaaaggtcgaaaaggtctctttcctgtggatagcacgtacattgggaacccaaagccgtacattgggaaccggaacccgtacattgggaacccaaagccgtacattgggaaccggtcacacatgtaagtgactgatataaaagagaaaaaaggcgatttttccgcctaaaactctttaaaacttattaaaactcttaaaacccgcctggcctgtgcataactgtctggccagcgcacagccgaagagctgcaaaaagcgcctacccttcggtcgctgcgctccctacgccccgccgcttcgcgtcggcctatcgcggccgctggccgctcaaaaatggctggcctacggccaggcaatctaccagggcgcggacaagccgcgccgtcgccactcgaccgccggcgctgaggtctgcctcgtgaagaaggtgttgctgactcataccaggcctgaatcgccccatcatccagccagaaagtgagggagccacggttgatgagagctttgttgtaggtggaccagttggtgattttgaacttttgctttgccacggaacggtctgcgttgtcgggaagatgcgtgatctgatccttcaactcagcaaaagttcgatttattcaacaaagccgccgtcccgtcaagtcagcgtaatgctctgccagtgttacaaccaattaaccaattctgattagaaaaactcatcgagcatcaaatgaaactgcaatttattcatatcaggattatcaataccatatttttgaaaaagccgtttctgtaatgaaggagaaaactcaccgaggcagttccataggatggcaagatcctggtatcggtctgcgattccgactcgtccaacatcaatacaacctattaatttcccctcgtcaaaaataaggttatcaagtgagaaatcaccatgagtgacgactgaatccggtgagaatggcaaaagctctgcattaatgaatcggccaacgcgcggggagaggcggtttgcgtattgggcgctcttccgcttcctcgctcactgactcgctgcgctcggtcgttcggctgcggcgagcggtatcagctcactcaaaggcggtaatacggttatccacagaatcaggggataacgcaggaaagaacatgtgagcaaaaggccagcaaaaggccaggaaccgtaaaaaggccgcgttgctggcgtttttccataggctccgcccccctgacgagcatcacaaaaatcgacgctcaagtcagaggtggcgaaacccgacaggactataaagataccaggcgtttccccctggaagctccctcgtgcgctctcctgttccgaccctgccgcttaccggatacctgtccgcctttctcccttcgggaagcgtggcgctttctcatagctcacgctgtaggtatctcagttcggtgtaggtcgttcgctccaagctgggctgtgtgcacgaaccccccgttcagcccgaccgctgcgccttatccggtaactatcgtcttgagtccaacccggtaagacacgacttatcgccactggcagcagccactggtaacaggattagcagagcgaggtatgtaggcggtgctacagagttcttgaagtggtggcctaactacggctacactagaagaacagtatttggtatctgcgctctgctgaagccagttaccttcggaaaaagagttggtagctcttgatccggcaaacaaaccaccgctggtagcggtggtttttttgtttgcaagcagcagattacgcgcagaaaaaaaggatctcaagaagatcctttgatcttttctacggggtctgacgctcagtggaacgaaaactcacgttaagggattttggtcatgagattatcaaaaaggatcttcacctagatccttttgatccggaatta

SEQ ID NO: 17 - DNA, 17531 bp, synthetic construct
  source 1..17531: mol_type = other DNA
attcctgtggttggcatgcacatacaaatggacgaacggataaaccttttcacgcccttttaaatatccgattattctaataaacgctcttttctcttaggtttacccgccaatatatcctgtcaaacactgatagtttaaactggcactagcctaacggtgttgactaactaggccgcttccctaattagctaacccgggggcgcgccgggaccggaattcattatgtggtctaggtaggttctatatataagaaaacttgaaatgttctaaaaaaaaattcaagcccatgcatgattgaagcaaacggtatagcaacggtgttaacctgatctagtgatctcttgcaatccttaacggccacctaccgcaggtagcaaacggcgtccccctcctcgatatctccgcggcgacctctggctttttccgcggaattgcgcggtggggacggattccacgagaccgcgacgcaaccgcctctcgccgctgggccccacaccgctcggtgccgtagcctcacgggactctttctccctcctcccccgttataaattggcttcatcccctccttgcctcatccatccaaatcccagtccccaatcccatcccttcgtaggagaaattcatcgaagctaagcgaatcctcgcgatcctctcaaggtactgcgagttttcgatccccctctcgacccctcgtatgtttgtgtttgtcgtagcgtttgattaggtatgctttccctgtttgtgttcgtcgtagcgtttgattaggtatgctttccctgttcgtgttcatcgtagtgtttgattaggtcgtgtgaggcgatggcctgctcgcgtccttcgatctgtagtcgatttgcgggtcgtggtgtagatctgcgggctgtgatgaagttatttggtgtgatctgctcgcctgattctgcgggttggctcgagtagatatgatggttggaccggttggttcgtttaccgcgctagggttgggctgggatgatgttgcatgcgccgttgcgcgtgatcccgcagcaggacttgcgtttgattgccagatctcgttacgattatgtgatttggtttggactttttagatctgtagcttctgcttatgtgccagatgcgcctactgctcatatgcctgatgataatcataaatggctgtggaactaactagttgattgcggagtcatgtatcagctacaggtgtagggactagctacaggtgtagggacttgcgtctaattgtttggtcctttactcatgttgcaattatgcaatttagtttagattgtttgttccactcatctaggctgtaaaagggacactgcttagattgctgtttaatctttttagtagattatattatattggtaacttattacccctattacatgccatacgtgacttctgctcatgcctgatgataatcatagatcactgtggaattaattagttgattgttgaatcatgtttcatgtacataccacggcacaattgcttagttccttaacaaatgcaaattttactgatccatgtatgatttgcgtggttctctaatgtgaaatactatagctacttgttagtaagaatcaggttcgtatgcttaatgctgtatgtgccttctgctcatgcctgatgataatcatatatcactggaattaattagttgatcgtttaatcatatatcaagtacataccatgccacaatttttagtcacttaacccatgcagattgaactggtccctgcatgttttgctaaattgttctattctgattagaccatatatcatgtatttttttttggtaatggttctcttattttaaatgctatatagttctggtacttgttagaaagatctgcttcatagtttagttgcctatccctcgaattaggatgctgagcagctgatcctatagctttgtttcatgtatcaattcttttgtgttcaacagtcagtttttgttagattcattgtaacttatggtcgcttactcttctggtcctcaatgcttgcagggatcccctaaatagaccatgccgaagaagaagcgcaaggtcgggggcgggggctcaggcgggggcgggagcggcggcgggggctctgggggcggcggcagcggcgggggcggcagcgggggcggcgggtcgatgctgttccaggatttcactcatctgtaccctctctcaaagactgttcggttcgagctcaagcctattgggcggactctggagcacatccacgcgaagaacttcctcagccaggacgaaaccatggccgacatgtaccagaaggtcaaggtcatcctcgacgactaccacagggacttcatcgcggacatgatgggcgaggtgaagctgacgaagctcgccgagttctacgacgtctacctcaagttccgcaagaacccgaaggacgacggcctccagaagcagctcaaggacctgcaggccgtcctgaggaaggagtccgtcaagcccatcggcagcggcggcaagtacaagaccggctacgacaggctgttcggcgccaagctgttcaaggacggcaaggagctcggcgacctggcgaagttcgtgatcgcgcaggagggcgagagctcccccaagctggcccacctggcccacttcgagaagttcagcacgtacttcaccggcttccacaagaacaggaagaacatgtacagcgacgaggacaagcacacggccatcgcctaccgcctcatccacgagaacctgccccgcttcatcgacaacctgcagatcctgacgaccatcaagcagaagcactccgccctgtacgaccagatcatcaacgagctcaccgcgagcggcctcgacgtgtccctcgccagccacctcgacggctaccacaagctcctgacccaggagggcatcaccgcctacaaccgcatcatcggcgaggtgaacggctacaccaacaagcacaaccagatctgccacaagtccgagaggatcgccaagctcaggcccctgcacaagcagatcctcagcgacggcatgggcgtgagcttcctcccgtccaagttcgccgacgactccgagatgtgccaggccgtgaacgagttctacaggcactacaccgacgtgttcgccaaggtgcagtccctgttcgacggcttcgacgaccaccagaaggacggcatctacgtggagcacaagaacctgaacgagctgtccaagcaggccttcggcgacttcgccctcctgggccgcgtgctggacggctactacgtggacgtcgtgaacccggagttcaacgagcgcttcgcgaaggcgaagacggacaacgcgaaggccaagctcaccaaggagaaggacaagttcatcaagggcgtccacagcctcgcgtccctggagcaggcgatcgagcaccacaccgcgcgccacgacgacgagtccgtgcaggccggcaagctcggccagtacttcaagcacggcctggccggcgtcgacaacccgatccagaagatccacaacaaccactccaccatcaagggcttcctggagagggagcgcccggcgggcgagcgcgcgctccccaagatcaagtccggcaagaaccccgagatgacgcagctcaggcagctgaaggagctgctcgacaacgcgctcaacgtggcgcacttcgccaagctgctcacgaccaagaccacgctggacaaccaggacggcaacttctacggcgagttcggcgtcctgtacgacgagctggcgaagatcccgaccctgtacaacaaggtccgcgactacctgagccagaagcccttctccaccgagaagtacaagctcaacttcggcaacccgaccctcctgaacggctgggacctcaacaaggagaaggacaacttcggcgtgatcctccagaaggacggctgctactacctcgccctgctggacaaggcgcacaagaaggtcttcgacaacgccccgaacaccggcaagaacgtgtaccagaagatggtgtacaagctgctccccggccccaacaagatgctgccgaaggtgttcttcgcgaagtccaacctcgactactacaaccccagcgccgagctcctggacaagtacgccaagggcacgcacaagaagggcgacaacttcaacctcaaggactgccacgcgctgatcgacttcttcaaggcgggcatcaacaagcaccccgagtggcagcacttcggcttcaagttcagcccgacctccagctacagggacctcagcgacttctaccgcgaggtggagccccagggctaccaggtgaagttcgtcgacatcaacgccgactacatcgacgagctcgtcgagcagggcaagctctacctgttccagatctacaacaaggacttctccccgaaggcccacggcaagccgaacctccacacgctctacttcaaggccctcttcagcgaggacaacctggccgacccgatctacaagctcaacggcgaggcgcagatcttctaccgcaaggccagcctggacatgaacgaaacgaccatccacagggccggcgaggtcctggagaacaagaacccggacaacccgaagaagaggcagttcgtctacgacatcatcaaggacaagaggtacacccaggacaagttcatgctccacgtcccgatcaccatgaacttcggcgtccagggcatgaccatcaaggagttcaacaagaaggtcaaccagagcatccagcagtacgacgaggtgaacgtcatcggcatcgaccgcggcgagaggcacctgctctacctgacggtcatcaactccaagggcgagatcctcgagcagcgcagcctgaacgacatcacgaccgcgagcgccaacggcacgcaggtcaccacgccgtaccacaagatcctcgacaagcgcgagatcgagaggctgaacgcgcgcgtcggctggggcgagatcgaaacgatcaaggagctcaagtccggctacctcagccacgtcgtgcaccagatcaaccagctcatgctgaagtacaacgcgatcgtggtcctcgaggacctgaacttcggcttcaagaggggccgcttcaaggtggagaagcagatctaccagaacttcgagaacgccctgatcaagaagctcaaccacctggtcctcaaggacaaggcggacgacgagatcggcagctacaagaacgcgctccagctgaccaacaacttcacggacctcaagtccatcggcaagcagacgggcttcctgttctacgtgccggcgtggaacacctccaagatcgacccggaaaccggcttcgtcgacctgctcaagccgcgctacgagaacatcgcgcagtcccaggcgttcttcggcaagttcgacaagatctgctacaacaccgacaagggctacttcgagttccacatcgactacgcgaagttcaccgacaaggccaagaactccaggcagaagtgggccatctgcagccacggcgacaagcgctacgtgtacgacaagacggcgaaccagaacaagggcgcggccaagggcatcaacgtgaacgacgagctgaagtccctcttcgcgcgctaccacatcaacgacaagcagccgaacctcgtcatggacatctgccagaacaacgacaaggagttccacaagagcctgatgtgcctgctcaagaccctgctcgccctccgctactccaacgcgagctccgacgaggacttcatcctcagccccgtcgcgaacgacgagggcgtgttcttcaactccgccctcgcggacgacacgcagccgcagaacgccgacgcgaacggcgcctaccacatcgccctcaagggcctgtggctgctcaacgagctcaagaactccgacgacctgaacaaggtgaagctcgccattgacaaccagacgtggctgaatttcgctcagaatagggggggcgggggctcaggcgggggcgggagcggcggcgggggctctgggggcggcggcagcggcgggggcggcagcgggggcggcgggtcgccgaagaagaagcgcaaggtgtccggcggcagctccggcggcagcccgaagaagaagcgcaaagtgtgagggacccgatcgttcaaacatttggcaataaagtttcttaagattgaatcctgttgccggtcttgcgatgattatcatataatttctgttgaattacgttaagcatgtaataattaacatgtaatgcatgacgttatttatgagatgggtttttatgattagagtcccgcaattatacatttaatacgcgatagaaaacaaaatatagcgcgcaaactaggataaattatcgcgcgcggtgtcatctatgttactagatcggtaccgaattcattatgtggtctaggtaggttctatatataagaaaacttgaaatgttctaaaaaaaaattcaagcccatgcatgattgaagcaaacggtatagcaacggtgttaacctgatctagtgatctcttgcaatccttaacggccacctaccgcaggtagcaaacggcgtccccctcctcgatatctccgcggcgacctctggctttttccgcggaattgcgcggtggggacggattccacgagaccgcgacgcaaccgcctctcgccgctgggccccacaccgctcggtgccgtagcctcacgggactctttctccctcctcccccgttataaattggcttcatcccctccttgcctcatccatccaaatcccagtccccaatcccatcccttcgtaggagaaattcatcgaagctaagcgaatcctcgcgatcctctcaaggtactgcgagttttcgatccccctctcgacccctcgtatgtttgtgtttgtcgtagcgtttgattaggtatgctttccctgtttgtgttcgtcgtagcgtttgattaggtatgctttccctgttcgtgttcatcgtagtgtttgattaggtcgtgtgaggcgatggcctgctcgcgtccttcgatctgtagtcgatttgcgggtcgtggtgtagatctgcgggctgtgatgaagttatttggtgtgatctgctcgcctgattctgcgggttggctcgagtagatatgatggttggaccggttggttcgtttaccgcgctagggttgggctgggatgatgttgcatgcgccgttgcgcgtgatcccgcagcaggacttgcgtttgattgccagatctcgttacgattatgtgatttggtttggactttttagatctgtagcttctgcttatgtgccagatgcgcctactgctcatatgcctgatgataatcataaatggctgtggaactaactagttgattgcggagtcatgtatcagctacaggtgtagggactagctacaggtgtagggacttgcgtctaattgtttggtcctttactcatgttgcaattatgcaatttagtttagattgtttgttccactcatctaggctgtaaaagggacactgcttagattgctgtttaatctttttagtagattatattatattggtaacttattacccctattacatgccatacgtgacttctgctcatgcctgatgataatcatagatcactgtggaattaattagttgattgttgaatcatgtttcatgtacataccacggcacaattgcttagttccttaacaaatgcaaattttactgatccatgtatgatttgcgtggttctctaatgtgaaatactatagctacttgttagtaagaatcaggttcgtatgcttaatgctgtatgtgccttctgctcatgcctgatgataatcatatatcactggaattaattagttgatcgtttaatcatatatcaagtacataccatgccacaatttttagtcacttaacccatgcagattgaactggtccctgcatgttttgctaaattgttctattctgattagaccatatatcatgtatttttttttggtaatggttctcttattttaaatgctatatagttctggtacttgttagaaagatctgcttcatagtttagttgcctatccctcgaattaggatgctgagcagctgatcctatagctttgtttcatgtatcaattcttttgtgttcaacagtcagtttttgttagattcattgtaacttatggtcgcttactcttctggtcctcaatgcttgcagaagcttgaaattctgatgagtccgtgaggacgaaacgagtaagctcgtcaatttctactgtttgtagatgggaaagaccgaggagaagatctaatttctactgtttgtagatgcaccaaggaaggggaggagatcaatttctactgtttgtagatgtcacagatcacaaacttcaaatgaatttctactgtttgtagatacgcccagaaagcatacgcagtcggccggcatggtcccagcctcctcgctggcgccggctgggcaacatgcttcggcatggcgaatgggacgatcgttcaaacatttggcaataaagtttcttaagattgaatcctgttgccggtcttgcgatgattatcatataatttctgttgaattacgttaagcatgtaataattaacatgtaatgcatgacgttatttatgagatgggtttttatgattagagtcccgcaattatacatttaatacgcgatagaaaacaaaatatagcgcgcaaactaggataaattatcgcgcgcggtgtcatctatgttactagatccctaggctgcagtgcagcgtgacccggtcgtgcccctctctagagataatgagcattgcatgtctaagttataaaaaattaccacatattttttttgtcacacttgtttgaagtgcagtttatctatctttatacatatatttaaactttactctacgaataatataatctatagtactacaataatatcagtgttttagagaatcatataaatgaacagttagacatggtctaaaggacaattgagtattttgacaacaggactctacagttttatctttttagtgtgcatgtgttctcctttttttttgcaaatagcttcacctatataatacttcatccattttattagtacatccatttagggtttagggttaatggtttttatagactaatttttttagtacatctattttattctattttagcctctaaattaagaaaactaaaactctattttagtttttttatttaataatttagatataaaatagaataaaataaagtgactaaaaattaaacaaataccctttaagaaattaaaaaaactaaggaaacatttttcttgtttcgagtagataatgccagcctgttaaacgccgtcgacgagtctaacggacaccaaccagcgaaccagcagcgtcgcgtcgggccaagcgaagcagacggcacggcatctctgtcgctgcctctggacccctctcgagagttccgctccaccgttggacttgctccgctgtcggcatccagaaattgcgtggcggagcggcagacgtgagccggcacggcaggcggcctcctcctcctctcacggcaccggcagctacgggggattcctttcccaccgctccttcgctttcccttcctcgcccgccgtaataaatagacaccccctccacaccctctttccccaacctcgtgttgttcggagcgcacacacacacaaccagatctcccccaaatccacccgtcggcacctccgcttcaaggtacgccgctcgtcctccccccccccccctctctaccttctctagatcggcgttccggtccatggttagggcccggtagttctacttctgttcatgtttgtgttagatccgtgtttgtgttagatccgtgctgctagcgttcgtacacggatgcgacctgtacgtcagacacgttctgattgctaacttgccagtgtttctctttggggaatcctgggatggctctagccgttccgcagacgggatcgatttcatgattttttttgtttcgttgcatagggtttggtttgcccttttcctttatttcaatatatgccgtgcacttgtttgtcgggtcatcttttcatgcttttttttgtcttggttgtgatgatgtggtctggttgggcggtcgttctagatcggagtagaattctgtttcaaactacctggtggatttattaattttggatctgtatgtgtgtgccatacatattcatagttacgaattgaagatgatggatggaaatatcgatctaggataggtatacatgttgatgcgggttttactgatgcatatacagagatgctttttgttcgcttggttgtgatgatgtggtgtggttgggcggtcgttcattcgttctagatcggagtagaatactgtttcaaactacctggtgtatttattaattttggaactgtatgtgtgtgtcatacatcttcatagttacgagtttaagatggatggaaatatcgatctaggataggtatacatgttgatgtgggttttactgatgcatatacatgatggcatatgcagcatctattcatatgctctaaccttgagtacctatctattataataaacaagtatgttttataattattttgatcttgatatacttggatgatggcatatgcagcagctatatgtggatttttttagccctgccttcatacgctatttatttgcttggtactgtttcttttgtcgatgctcaccctgttgtttggtgttacttctgcagggatcaccgatcatgcaaaaactcattaactcagtgcaaaactatgcctggggcagcaaaacggcgttgactgaactttatggtatggaaaatccgtccagccagccgatggccgagctgtggatgggcgcacatccgaaaagcagttcacgagtgcagaatgccgccggagatatcgtttcactgcgtgatgtgattgagagtgataaatcgactctgctcggagaggccgttgccaaacgctttggcgaactgcctttcctgttcaaagtattatgcgcagcacagccactctccattcaggttcatccaaacaaacacaattctgaaatcggttttgccaaagaaaatgccgcaggtatcccgatggatgccgccgagcgtaactataaagatcctaaccacaagccggagctggtttttgcgctgacgcctttccttgcgatgaacgcgtttcgtgaattttccgagattgtctccctactccagccggtcgcaggtgcacatccggcgattgctcactttttacaacagcctgatgccgaacgtttaagcgaactgttcgccagcctgttgaatatgcagggtgaagaaaaatcccgcgcgctggcgattttaaaatcggccctcgatagccagcagggtgaaccgtggcaaacgattcgtttaatttctgaattttacccggaagacagcggtctgttctccccgctattgctgaatgtggtgaaattgaaccctggcgaagcgatgttcctgttcgctgaaacaccgcacgcttacctgcaaggcgtggcgctggaagtgatggcaaactccgataacgtgctgcgtgcgggtctgacgcctaaatacattgatattccggaactggttgccaatgtgaaattcgaagccaaaccggctaaccagttgttgacccagccggtgaaacaaggtgcagaactggacttcccgattccagtggatgattttgccttctcgctgcatgaccttagtgataaagaaaccaccattagccagcagagtgccgccattttgttctgcgtcgaaggcgatgcaacgttgtggaaaggttctcagcagttacagcttaaaccgggtgaatcagcgtttattgccgccaacgaatcaccggtgactgtcaaaggccacggccgtttagcgcgtgtttacaacaagctgtaagagcttactgaaaaaattaacatctcttgctaagctgggagctcgatccgtcgacctgcagatcgttcaaacatttggcaataaagtttcttaagattgaatcctgttgccggtcttgcgatgattatcatataatttctgttgaattacgttaagcatgtaataattaacatgtaatgcatgacgttatttatgagatgggtttttatgattagagtcccgcaattatacatttaatacgcgatagaaaacaaaatatagcgcgcaaactaggataaattatcgcgcgcggtgtcatctatgttactagatccggaccgcctgcaggcccgggggcgcgccctaattagctaacggccaggatcgccgcgtgagcctttagcaactagctagattaattaacgcaatctgttattaagttgtctaagcgtcaatttgtttacaccacaatatatcctgccaccagccagccaacagctccccgaccggcagctcggcacaaaatcaccactcgatacaggcagcccatcagaattaattctcatgtttgacagcttatcatcgactgcacggtgcaccaatgcttctggcgtcaggcagccatcggaagctgtggtatggctgtgcaggtcgtaaatcactgcataattcgtgtcgctcaaggcgcactcccgttctggataatgttttttgcgccgacatcataacggttctggcaaatattctgaaatgagctgttgacaattaatcatccggctcgtataatgtgtggaattgtgagcggataacaatttcacacaggaaacagaccatgagggaagcgttgatcgccgaagtatcgactcaactatcagaggtagttggcgtcatcgagcgccatctcgaaccgacgttgctggccgtacatttgtacggctccgcagtggatggcggcctgaagccacacagtgatattgatttgctggttacggtgaccgtaaggcttgatgaaacaacgcggcgagctttgatcaacgaccttttggaaacttcggcttcccctggagagagcgagattctccgcgctgtagaagtcaccattgttgtgcacgacgacatcattccgtggcgttatccagctaagcgcgaactgcaatttggagaatggcagcgcaatgacattcttgcaggtatcttcgagccagccacgatcgacattgatctggctatcttgctgacaaaagcaagagaacatagcgttgccttggtaggtccagcggcggaggaactctttgatccggttcctgaacaggatctatttgaggcgctaaatgaaaccttaacgctatggaactcgccgcccgactgggctggcgatgagcgaaatgtagtgcttacgttgtcccgcatttggtacagcgcagtaaccggcaaaatcgcgccgaaggatgtcgctgccgactgggcaatggagcgcctgccggcccagtatcagcccgtcatacttgaagctaggcaggcttatcttggacaagaagatcgcttggcctcgcgcgcagatcagttggaagaatttgttcactacgtgaaaggcgagatcaccaaagtagtcggcaaataaagctctagtggatctccgtacccagggatctggctcgcggcggacgcacgacgccggggcgagaccataggcgatctcctaaatcaatagtagctgtaacctcgaagcgtttcacttgtaacaacgattgagaatttttgtcataaaattgaaatacttggttcgcatttttgtcatccgcggtcagccgcaattctgacgaactgcccatttagctggagatgattgtacatccttcacgtgaaaatttctcaagcgctgtgaacaagggttcagattttagattgaaaggtgagccgttgaaacacgttcttcttgtcgatgacgacgtcgctatgcggcatcttattattgaataccttacgatccacgccttcaaagtgaccgcggtagccgacagcacccagttcacaagagtactctcttccgcgacggtcgatgtcgtggttgttgatctagatttaggtcgtgaagatgggctcgagatcgttcgtaatctggcggcaaagtctgatattccaatcataattatcagtggcgaccgccttgaggagacggataaagttgttgcactcgagctaggagcaagtgattttatcgctaagccgttcagtatcagagagtttctagcacgcattcgggttgccttgcgcgtgcgccccaacgttgtccgctccaaagaccgacggtctttttgttttactgactggacacttaatctcaggcaacgtcgcttgatgtccgaagctggcggtgaggtgaaacttacggcaggtgagttcaatcttctcctcgcgtttttagagaaaccccgcgacgttctatcgcgcgagcaacttctcattgccagtcgagtacgcgacgaggaggtttatgacaggagtatagatgttctcattttgaggctgcgccgcaaacttgaggcagatccgtcaagccctcaactgataaaaacagcaagaggtgccggttatttctttgacgcggacgtgcaggtttcgcacggggggacgatggcagcctgagccaattcccagatccccgaggaatcggcgtgagcggtcgcaaaccatccggcccggtacaaatcggcgcggcgctgggtgatgacctggtggagaagttgaaggccgcgcaggccgcccagcggcaacgcatcgaggcagaagcacgccccggtgaatcgtggcaagcggccgctgatcgaatccgcaaagaatcccggcaaccgccggcagccggtgcgccgtcgattaggaagccgcccaagggcgacgagcaaccagattttttcgttccgatgctctatgacgtgggcacccgcgatagtcgcagcatcatggacgtggccgttttccgtctgtcgaagcgtgaccgacgagctggcgaggtgatccgctacgagcttccagacgggcacgtagaggtttccgcagggccggccggcatggccagtgtgtgggattacgacctggtactgatggcggtttcccatctaaccgaatccatgaaccgataccgggaagggaagggagacaagcccggccgcgtgttccgtccacacgttgcggacgtactcaagttctgccggcgagccgatggcggaaagcagaaagacgacctggtagaaacctgcattcggttaaacaccacgcacgttgccatgcagcgtacgaagaaggccaagaacggccgcctggtgacggtatccgagggtgaagccttgattagccgctacaagatcgtaaagagcgaaaccgggcggccggagtacatcgagatcgagctggctgattggatgtaccgcgagatcacagaaggcaagaacccggacgtgctgacggttcaccccgattactttttgatcgatcccggcatcggccgttttctctaccgcctggcacgccgcgccgcaggcaaggcagaagccagatggttgttcaagacgatctacgaacgcagtggcagcgccggagagttcaagaagttctgtttcaccgtgcgcaagctgatcgggtcaaatgacctgccggagtacgatttgaaggaggaggcggggcaggctggcccgatcctagtcatgcgctaccgcaacctgatcgagggcgaagcatccgccggttcctaatgtacggagcagatgctagggcaaattgccctagcaggggaaaaaggtcgaaaaggtctctttcctgtggatagcacgtacattgggaacccaaagccgtacattgggaaccggaacccgtacattgggaacccaaagccgtacattgggaaccggtcacacatgtaagtgactgatataaaagagaaaaaaggcgatttttccgcctaaaactctttaaaacttattaaaactcttaaaacccgcctggcctgtgcataactgtctggccagcgcacagccgaagagctgcaaaaagcgcctacccttcggtcgctgcgctccctacgccccgccgcttcgcgtcggcctatcgcggccgctggccgctcaaaaatggctggcctacggccaggcaatctaccagggcgcggacaagccgcgccgtcgccactcgaccgccggcgctgaggtctgcctcgtgaagaaggtgttgctgactcataccaggcctgaatcgccccatcatccagccagaaagtgagggagccacggttgatgagagctttgttgtaggtggaccagttggtgattttgaacttttgctttgccacggaacggtctgcgttgtcgggaagatgcgtgatctgatccttcaactcagcaaaagttcgatttattcaacaaagccgccgtcccgtcaagtcagcgtaatgctctgccagtgttacaaccaattaaccaattctgattagaaaaactcatcgagcatcaaatgaaactgcaatttattcatatcaggattatcaataccatatttttgaaaaagccgtttctgtaatgaaggagaaaactcaccgaggcagttccataggatggcaagatcctggtatcggtctgcgattccgactcgtccaacatcaatacaacctattaatttcccctcgtcaaaaataaggttatcaagtgagaaatcaccatgagtgacgactgaatccggtgagaatggcaaaagctctgcattaatgaatcggccaacgcgcggggagaggcggtttgcgtattgggcgctcttccgcttcctcgctcactgactcgctgcgctcggtcgttcggctgcggcgagcggtatcagctcactcaaaggcggtaatacggttatccacagaatcaggggataacgcaggaaagaacatgtgagcaaaaggccagcaaaaggccaggaaccgtaaaaaggccgcgttgctggcgtttttccataggctccgcccccctgacgagcatcacaaaaatcgacgctcaagtcagaggtggcgaaacccgacaggactataaagataccaggcgtttccccctggaagctccctcgtgcgctctcctgttccgaccctgccgcttaccggatacctgtccgcctttctcccttcgggaagcgtggcgctttctcatagctcacgctgtaggtatctcagttcggtgtaggtcgttcgctccaagctgggctgtgtgcacgaaccccccgttcagcccgaccgctgcgccttatccggtaactatcgtcttgagtccaacccggtaagacacgacttatcgccactggcagcagccactggtaacaggattagcagagcgaggtatgtaggcggtgctacagagttcttgaagtggtggcctaactacggctacactagaagaacagtatttggtatctgcgctctgctgaagccagttaccttcggaaaaagagttggtagctcttgatccggcaaacaaaccaccgctggtagcggtggtttttttgtttgcaagcagcagattacgcgcagaaaaaaaggatctcaagaagatcctttgatcttttctacggggtctgacgctcagtggaacgaaaactcacgttaagggattttggtcatgagattatcaaaaaggatcttcacctagatccttttgatccggaatta

SEQ ID NO: 18 - DNA, 23 bp, synthetic construct
  source 1..23: mol_type = other DNA
gggaaagaccgaggagaagatct

SEQ ID NO: 19 - DNA, 23 bp, synthetic construct
  source 1..23: mol_type = other DNA
gcaccaaggaaggggaggagatc

SEQ ID NO: 20 - DNA, 24 bp, synthetic construct
  source 1..24: mol_type = other DNA
gtcacagatcacaaacttcaaatg

SEQ ID NO: 21 - DNA, 23 bp, synthetic construct
  source 1..23: mol_type = other DNA
acgcccagaaagcatacgcagtc

SEQ ID NO: 22 - protein, 8 aa, Moraxella bovoculi
LDMNETTI

SEQ ID NO: 23 - protein, 39 aa, Moraxella bovoculi
PIPDTLYQELYDYVNHRLSHDLSDEARALLPNVITKEVS

SEQ ID NO: 24 - protein, 8 aa, unidentified
  source 1..8: note = Lachnospiraceae bacterium ND2006
LKKEELVV

SEQ ID NO: 25 - protein, 5 aa, unidentified
  source 1..5: note = Lachnospiraceae bacterium ND2006
TTTLS

SEQ ID NO: 26 - protein, 1341 aa, synthetic construct
MPKKKRKVGGGGSGGGGSGGGGSGGGGSGGGGSGGGGSMLFQDFTHLYPLSKTVRFELKPIGRTLEHIHAKNFLSQDETMADMYQKVKVILDDYHRDFIADMMGEVKLTKLAEFYDVYLKFRKNPKDDGLQKQLKDLQAVLRKESVKPIGSGGKYKTGYDRLFGAKLFKDGKELGDLAKFVIAQEGESSPKLAHLAHFEKFSTYFTGFHDNRKNMYSDEDKHTAIAYRLIHENLPRFIDNLQILTTIKQKHSALYDQIINELTASGLDVSLASHLDGYHKLLTQEGITAYNRIIGEVNGYTNKHNQICHKSERIAKLRPLHKQILSDGMGVSFLPSKFADDSEMCQAVNEFYRHYTDVFAKVQSLFDGFDDHQKDGIYVEHKNLNELSKQAFGDFALLGRVLDGYYVDVVNPEFNERFAKAKTDNAKAKLTKEKDKFIKGVHSLASLEQAIEHHTARHDDESVQAGKLGQYFKHGLAGVDNPIQKIHNNHSTIKGFLERERPAGERALPKIKSGKNPEMTQLRQLKELLDNALNVAHFAKLLTTKTTLDNQDGNFYGEFGVLYDELAKIPTLYNKVRDYLSQKPFSTEKYKLNFGNPTLLNGWDLNKEKDNFGVILQKDGCYYLALLDKAHKKVFDNAPNTGKNVYQKMVYKLLPGPNKMLPKVFFAKSNLDYYNPSAELLDKYAKGTHKKGDNFNLKDCHALIDFFKAGINKHPEWQHFGFKFSPTSSYRDLSDFYREVEPQGYQVKFVDINADYIDELVEQGKLYLFQIYNKDFSPKAHGKPNLHTLYFKALFSEDNLADPIYKLNGEAQIFYRKASLDMNETTIHRAGEVLANKNPDNPKKRQFVYDIIKDKRYTQDKFMLHVPITMNFGVQGMTIKEFNKKVNQSIQQYDEVNVIGIDRGERHLLYLTVINSKGEILEQRSLNDITTASANGTQVTTPYHKILDKREIERLNARVGWGEIETIKELKSGYLSHVVHQINQLMLKYNAIVVLEDLNFGFKRGRFKVEKQIYQNFENALIKKLNHLVLKDKADDEIGSYKNALQLTNNFTDLKSIGKQTGFLFYVPAWNTSKIDPETGFVDLLKPRYENIAQSQAFFGKFDKICYNTDKGYFEFHIDYAKFTDKAKNSRQKWAICSHGDKRYVYDKTANQNKGAAKGINVNDELKSLFARYHINDKQPNLVMDICQNNDKEFHKSLMCLLKTLLALRYSNASSDEDFILSPVANDEGVFFNSALADDTQPQNADANGAYHIALKGLWLLNELKNSDDLNKVKLAIDNQTWLNFAQNRGGGGSGGGGSGGGGSGGGGSGGGGSGGGGSPKKKRKVSGGSSGGSPKKKRKV

SEQ ID NO: 27 - DNA, 17531 bp, synthetic construct
  source 1..17531: mol_type = other DNA
attcctgtggttggcatgcacatacaaatggacgaacggataaaccttttcacgcccttttaaatatccgattattctaataaacgctcttttctcttaggtttacccgccaatatatcctgtcaaacactgatagtttaaactggcactagcctaacggtgttgactaactaggccgcttccctaattagctaacccgggggcgcgccgggaccggaattcattatgtggtctaggtaggttctatatataagaaaacttgaaatgttctaaaaaaaaattcaagcccatgcatgattgaagcaaacggtatagcaacggtgttaacctgatctagtgatctcttgcaatccttaacggccacctaccgcaggtagcaaacggcgtccccctcctcgatatctccgcggcgacctctggctttttccgcggaattgcgcggtggggacggattccacgagaccgcgacgcaaccgcctctcgccgctgggccccacaccgctcggtgccgtagcctcacgggactctttctccctcctcccccgttataaattggcttcatcccctccttgcctcatccatccaaatcccagtccccaatcccatcccttcgtaggagaaattcatcgaagctaagcgaatcctcgcgatcctctcaaggtactgcgagttttcgatccccctctcgacccctcgtatgtttgtgtttgtcgtagcgtttgattaggtatgctttccctgtttgtgttcgtcgtagcgtttgattaggtatgctttccctgttcgtgttcatcgtagtgtttgattaggtcgtgtgaggcgatggcctgctcgcgtccttcgatctgtagtcgatttgcgggtcgtggtgtagatctgcgggctgtgatgaagttatttggtgtgatctgctcgcctgattctgcgggttggctcgagtagatatgatggttggaccggttggttcgtttaccgcgctagggttgggctgggatgatgttgcatgcgccgttgcgcgtgatcccgcagcaggacttgcgtttgattgccagatctcgttacgattatgtgatttggtttggactttttagatctgtagcttctgcttatgtgccagatgcgcctactgctcatatgcctgatgataatcataaatggctgtggaactaactagttgattgcggagtcatgtatcagctacaggtgtagggactagctacaggtgtagggacttgcgtctaattgtttggtcctttactcatgttgcaattatgcaatttagtttagattgtttgttccactcatctaggctgtaaaagggacactgcttagattgctgtttaatctttttagtagattatattatattggtaacttattacccctattacatgccatacgtgacttctgctcatgcctgatgataatcatagatcactgtggaattaattagttgattgttgaatcatgtttcatgtacataccacggcacaattgcttagttccttaacaaatgcaaattttactgatccatgtatgatttgcgtggttctctaatgtgaaatactatagctacttgttagtaagaatcaggttcgtatgcttaatgctgtatgtgccttctgctcatgcctgatgataatcatatatcactggaattaattagttgatcgtttaatcatatatcaagtacataccatgccacaatttttagtcacttaacccatgcagattgaactggtccctgcatgttttgctaaattgttctattctgattagaccatatatcatgtatttttttttggtaatggttctcttattttaaatgctatatagttctggtacttgttagaaagatctgcttcatagtttagttgcctatccctcgaattaggatgctgagcagctgatcctatagctttgtttcatgtatcaattcttttgtgttcaacagtcagtttttgttagattcattgtaacttatggtcgcttactcttctggtcctcaatgcttgcagggatcccctaaatagaccatgccgaagaagaagcgcaaggtcgggggcgggggctcaggcgggggcgggagcggcggcgggggctctgggggcggcggcagcggcgggggcggcagcgggggcggcgggtcgatgctgttccaggatttcactcatctgtaccctctctcaaagactgttcggttcgagctcaagcctattgggcggactctggagcacatccacgcgaagaacttcctcagccaggacgaaaccatggccgacatgtaccagaaggtcaaggtcatcctcgacgactaccacagggacttcatcgcggacatgatgggcgaggtgaagctgacgaagctcgccgagttctacgacgtctacctcaagttccgcaagaacccgaaggacgacggcctccagaagcagctcaaggacctgcaggccgtcctgaggaaggagtccgtcaagcccatcggcagcggcggcaagtacaagaccggctacgacaggctgttcggcgccaagctgttcaaggacggcaaggagctcggcgacctggcgaagttcgtgatcgcgcaggagggcgagagctcccccaagctggcccacctggcccacttcgagaagttcagcacgtacttcaccggcttccacgacaacaggaagaacatgtacagcgacgaggacaagcacacggccatcgcctaccgcctcatccacgagaacctgccccgcttcatcgacaacctgcagatcctgacgaccatcaagcagaagcactccgccctgtacgaccagatcatcaacgagctcaccgcgagcggcctcgacgtgtccctcgccagccacctcgacggctaccacaagctcctgacccaggagggcatcaccgcctacaaccgcatcatcggcgaggtgaacggctacaccaacaagcacaaccagatctgccacaagtccgagaggatcgccaagctcaggcccctgcacaagcagatcctcagcgacggcatgggcgtgagcttcctcccgtccaagttcgccgacgactccgagatgtgccaggccgtgaacgagttctacaggcactacaccgacgtgttcgccaaggtgcagtccctgttcgacggcttcgacgaccaccagaaggacggcatctacgtggagcacaagaacctgaacgagctgtccaagcaggccttcggcgacttcgccctcctgggccgcgtgctggacggctactacgtggacgtcgtgaacccggagttcaacgagcgcttcgcgaaggcgaagacggacaacgcgaaggccaagctcaccaaggagaaggacaagttcatcaagggcgtccacagcctcgcgtccctggagcaggcgatcgagcaccacaccgcgcgccacgacgacgagtccgtgcaggccggcaagctcggccagtacttcaagcacggcctggccggcgtcgacaacccgatccagaagatccacaacaaccactccaccatcaagggcttcctggagagggagcgcccggcgggcgagcgcgcgctccccaagatcaagtccggcaagaaccccgagatgacgcagctcaggcagctgaaggagctgctcgacaacgcgctcaacgtggcgcacttcgccaagctgctcacgaccaagaccacgctggacaaccaggacggcaacttctacggcgagttcggcgtcctgtacgacgagctggcgaagatcccgaccctgtacaacaaggtccgcgactacctgagccagaagcccttctccaccgagaagtacaagctcaacttcggcaacccgaccctcctgaacggctgggacctcaacaaggagaaggacaacttcggcgtgatcctccagaaggacggctgctactacctcgccctgctggacaaggcgcacaagaaggtcttcgacaacgccccgaacaccggcaagaacgtgtaccagaagatggtgtacaagctgctccccggccccaacaagatgctgccgaaggtgttcttcgcgaagtccaacctcgactactacaaccccagcgccgagctcctggacaagtacgccaagggcacgcacaagaagggcgacaacttcaacctcaaggactgccacgcgctgatcgacttcttcaaggcgggcatcaacaagcaccccgagtggcagcacttcggcttcaagttcagcccgacctccagctacagggacctcagcgacttctaccgcgaggtggagccccagggctaccaggtgaagttcgtcgacatcaacgccgactacatcgacgagctcgtcgagcagggcaagctctacctgttccagatctacaacaaggacttctccccgaaggcccacggcaagccgaacctccacacgctctacttcaaggccctcttcagcgaggacaacctggccgacccgatctacaagctcaacggcgaggcgcagatcttctaccgcaaggccagcctggacatgaacgaaacgaccatccacagggccggcgaggtcctggccaacaagaacccggacaacccgaagaagaggcagttcgtctacgacatcatcaaggacaagaggtacacccaggacaagttcatgctccacgtcccgatcaccatgaacttcggcgtccagggcatgaccatcaaggagttcaacaagaaggtcaaccagagcatccagcagtacgacgaggtgaacgtcatcggcatcgaccgcggcgagaggcacctgctctacctgacggtcatcaactccaagggcgagatcctcgagcagcgcagcctgaacgacatcacgaccgcgagcgccaacggcacgcaggtcaccacgccgtaccacaagatcctcgacaagcgcgagatcgagaggctgaacgcgcgcgtcggctggggcgagatcgaaacgatcaaggagctcaagtccggctacctcagccacgtcgtgcaccagatcaaccagctcatgctgaagtacaacgcgatcgtggtcctcgaggacctgaacttcggcttcaagaggggccgcttcaaggtggagaagcagatctaccagaacttcgagaacgccctgatcaagaagctcaaccacctggtcctcaaggacaaggcggacgacgagatcggcagctacaagaacgcgctccagctgaccaacaacttcacggacctcaagtccatcggcaagcagacgggcttcctgttctacgtgccggcgtggaacacctccaagatcgacccggaaaccggcttcgtcgacctgctcaagccgcgctacgagaacatcgcgcagtcccaggcgttcttcggcaagttcgacaagatctgctacaacaccgacaagggctacttcgagttccacatcgactacgcgaagttcaccgacaaggccaagaactccaggcagaagtgggccatctgcagccacggcgacaagcgctacgtgtacgacaagacggcgaaccagaacaagggcgcggccaagggcatcaacgtgaacgacgagctgaagtccctcttcgcgcgctaccacatcaacgacaagcagccgaacctcgtcatggacatctgccagaacaacgacaaggagttccacaagagcctgatgtgcctgctcaagaccctgctcgccctccgctactccaacgcgagctccgacgaggacttcatcctcagccccgtcgcgaacgacgagggcgtgttcttcaactccgccctcgcggacgacacgcagccgcagaacgccgacgcgaacggcgcctaccacatcgccctcaagggcctgtggctgctcaacgagctcaagaactccgacgacctgaacaaggtgaagctcgccattgacaaccagacgtggctgaatttcgctcagaatagggggggcgggggctcaggcgggggcgggagcggcggcgggggctctgggggcggcggcagcggcgggggcggcagcgggggcggcgggtcgccgaagaagaagcgcaaggtgtccggcggcagctccggcggcagcccgaagaagaagcgcaaagtgtgagggacccgatcgttcaaacatttggcaataaagtttcttaagattgaatcctgttgccggtcttgcgatgattatcatataatttctgttgaattacgttaagcatgtaataattaacatgtaatgcatgacgttatttatgagatgggtttttatgattagagtcccgcaattatacatttaatacgcgatagaaaacaaaatatagcgcgcaaactaggataaattatcgcgcgcggtgtcatctatgttactagatcggtaccgaattcattatgtggtctaggtaggttctatatataagaaaacttgaaatgttctaaaaaaaaattcaagcccatgcatgattgaagcaaacggtatagcaacggtgttaacctgatctagtgatctcttgcaatccttaacggccacctaccgcaggtagcaaacggcgtccccctcctcgatatctccgcggcgacctctggctttttccgcggaattgcgcggtggggacggattccacgagaccgcgacgcaaccgcctctcgccgctgggccccacaccgctcggtgccgtagcctcacgggactctttctccctcctcccccgttataaattggcttcatcccctccttgcctcatccatccaaatcccagtccccaatcccatcccttcgtaggagaaattcatcgaagctaagcgaatcctcgcgatcctctcaaggtactgcgagttttcgatccccctctcgacccctcgtatgtttgtgtttgtcgtagcgtttgattaggtatgctttccctgtttgtgttcgtcgtagcgtttgattaggtatgctttccctgttcgtgttcatcgtagtgtttgattaggtcgtgtgaggcgatggcctgctcgcgtccttcgatctgtagtcgatttgcgggtcgtggtgtagatctgcgggctgtgatgaagttatttggtgtgatctgctcgcctgattctgcgggttggctcgagtagatatgatggttggaccggttggttcgtttaccgcgctagggttgggctgggatgatgttgcatgcgccgttgcgcgtgatcccgcagcaggacttgcgtttgattgccagatctcgttacgattatgtgatttggtttggactttttagatctgtagcttctgcttatgtgccagatgcgcctactgctcatatgcctgatgataatcataaatggctgtggaactaactagttgattgcggagtcatgtatcagctacaggtgtagggactagctacaggtgtagggacttgcgtctaattgtttggtcctttactcatgttgcaattatgcaatttagtttagattgtttgttccactcatctaggctgtaaaagggacactgcttagattgctgtttaatctttttagtagattatattatattggtaacttattacccctattacatgccatacgtgacttctgctcatgcctgatgataatcatagatcactgtggaattaattagttgattgttgaatcatgtttcatgtacataccacggcacaattgcttagttccttaacaaatgcaaattttactgatccatgtatgatttgcgtggttctctaatgtgaaatactatagctacttgttagtaagaatcaggttcgtatgcttaatgctgtatgtgccttctgctcatgcctgatgataatcatatatcactggaattaattagttgatcgtttaatcatatatcaagtacataccatgccacaatttttagtcacttaacccatgcagattgaactggtccctgcatgttttgctaaattgttctattctgattagaccatatatcatgtatttttttttggtaatggttctcttattttaaatgctatatagttctggtacttgttagaaagatctgcttcatagtttagttgcctatccctcgaattaggatgctgagcagctgatcctatagctttgtttcatgtatcaattcttttgtgttcaacagtcagtttttgttagattcattgtaacttatggtcgcttactcttctggtcctcaatgcttgcagaagcttgaaattctgatgagtccgtgaggacgaaacgagtaagctcgtcaatttctactgtttgtagatgggaaagaccgaggagaagatctaatttctactgtttgtagatgcaccaaggaaggggaggagatcaatttctactgtttgtagatgtcacagatcacaaacttcaaatgaatttctactgtttgtagatacgcccagaaagcatacgcagtcggccggcatggtcccagcctcctcgctggcgccggctgggcaacatgcttcggcatggcgaatgggacgatcgttcaaacatttggcaataaagtttcttaagattgaatcctgttgccggtcttgcgatgattatcatataatttctgttgaattacgttaagcatgtaataattaacatgtaatgcatgacgttatttatgagatgggtttttatgattagagtcccgcaattatacatttaatacgcgatagaaaacaaaatatagcgcgcaaactaggataaattatcgcgcgcggtgtcatctatgttactagatccctaggctgcagtgcagcgtgacccggtcgtgcccctctctagagataatgagcattgcatgtctaagttataaaaaattaccacatattttttttgtcacacttgtttgaagtgcagtttatctatctttatacatatatttaaactttactctacgaataatataatctatagtactacaataatatcagtgttttagagaatcatataaatgaacagttagacatggtctaaaggacaattgagtattttgacaacaggactctacagttttatctttttagtgtgcatgtgttctcctttttttttgcaaatagcttcacctatataatacttcatccattttattagtacatccatttagggtttagggttaatggtttttatagactaatttttttagtacatctattttattctattttagcctctaaattaagaaaactaaaactctattttagtttttttatttaataatttagatataaaatagaataaaataaagtgactaaaaattaaacaaataccctttaagaaattaaaaaaactaaggaaacatttttcttgtttcgagtagataatgccagcctgttaaacgccgtcgacgagtctaacggacaccaaccagcgaaccagcagcgtcgcgtcgggccaagcgaagcagacggcacggcatctctgtcgctgcctctggacccctctcgagagttccgctccaccgttggacttgctccgctgtcggcatccagaaattgcgtggcggagcggcagacgtgagccggcacggcaggcggcctcctcctcctctcacggcaccggcagctacgggggattcctttcccaccgctccttcgctttcccttcctcgcccgccgtaataaatagacaccccctccacaccctctttccccaacctcgtgttgttcggagcgcacacacacacaaccagatctcccccaaatccacccgtcggcacctccgcttcaaggtacgccgctcgtcctccccccccccccctctctaccttctctagatcggcgttccggtccatggttagggcccggtagttctacttctgttcatgtttgtgttagatccgtgtttgtgttagatccgtgctgctagcgttcgtacacggatgcgacctgtacgtcagacacgttctgattgctaacttgccagtgtttctctttggggaatcctgggatggctctagccgttccgcagacgggatcgatttcatgattttttttgtttcgttgcatagggtttggtttgcccttttcctttatttcaatatatgccgtgcacttgtttgtcgggtcatcttttcatgcttttttttgtcttggttgtgatgatgtggtctggttgggcggtcgttctagatcggagtagaattctgtttcaaactacctggtggatttattaattttggatctgtatgtgtgtgccatacatattcatagttacgaattgaagatgatggatggaaatatcgatctaggataggtatacatgttgatgcgggttttactgatgcatatacagagatgctttttgttcgcttggttgtgatgatgtggtgtggttgggcggtcgttcattcgttctagatcggagtagaatactgtttcaaactacctggtgtatttattaattttggaactgtatgtgtgtgtcatacatcttcatagttacgagtttaagatggatggaaatatcgatctaggataggtatacatgttgatgtgggttttactgatgcatatacatgatggcatatgcagcatctattcatatgctctaaccttgagtacctatctattataataaacaagtatgttttataattattttgatcttgatatacttggatgatggcatatgcagcagctatatgtggatttttttagccctgccttcatacgctatttatttgcttggtactgtttcttttgtcgatgctcaccctgttgtttggtgttacttctgcagggatcaccgatcatgcaaaaactcattaactcagtgcaaaactatgcctggggcagcaaaacggcgttgactgaactttatggtatggaaaatccgtccagccagccgatggccgagctgtggatgggcgcacatccgaaaagcagttcacgagtgcagaatgccgccggagatatcgtttcactgcgtgatgtgattgagagtgataaatcgactctgctcggagaggccgttgccaaacgctttggcgaactgcctttcctgttcaaagtattatgcgcagcacagccactctccattcaggttcatccaaacaaacacaattctgaaatcggttttgccaaagaaaatgccgcaggtatcccgatggatgccgccgagcgtaactataaagatcctaaccacaagccggagctggtttttgcgctgacgcctttccttgcgatgaacgcgtttcgtgaattttccgagattgtctccctactccagccggtcgcaggtgcacatccggcgattgctcactttttacaacagcctgatgccgaacgtttaagcgaactgttcgccagcctgttgaatatgcagggtgaagaaaaatcccgcgcgctggcgattttaaaatcggccctcgatagccagcagggtgaaccgtggcaaacgattcgtttaatttctgaattttacccggaagacagcggtctgttctccccgctattgctgaatgtggtgaaattgaaccctggcgaagcgatgttcctgttcgctgaaacaccgcacgcttacctgcaaggcgtggcgctggaagtgatggcaaactccgataacgtgctgcgtgcgggtctgacgcctaaatacattgatattccggaactggttgccaatgtgaaattcgaagccaaaccggctaaccagttgttgacccagccggtgaaacaaggtgcagaactggacttcccgattccagtggatgattttgccttctcgctgcatgaccttagtgataaagaaaccaccattagccagcagagtgccgccattttgttctgcgtcgaaggcgatgcaacgttgtggaaaggttctcagcagttacagcttaaaccgggtgaatcagcgtttattgccgccaacgaatcaccggtgactgtcaaaggccacggccgtttagcgcgtgtttacaacaagctgtaagagcttactgaaaaaattaacatctcttgctaagctgggagctcgatccgtcgacctgcagatcgttcaaacatttggcaataaagtttcttaagattgaatcctgttgccggtcttgcgatgattatcatataatttctgttgaattacgttaagcatgtaataattaacatgtaatgcatgacgttatttatgagatgggtttttatgattagagtcccgcaattatacatttaatacgcgatagaaaacaaaatatagcgcgcaaactaggataaattatcgcgcgcggtgtcatctatgttactagatccggaccgcctgcaggcccgggggcgcgccctaattagctaacggccaggatcgccgcgtgagcctttagcaactagctagattaattaacgcaatctgttattaagttgtctaagcgtcaatttgtttacaccacaatatatcctgccaccagccagccaacagctccccgaccggcagctcggcacaaaatcaccactcgatacaggcagcccatcagaattaattctcatgtttgacagcttatcatcgactgcacggtgcaccaatgcttctggcgtcaggcagccatcggaagctgtggtatggctgtgcaggtcgtaaatcactgcataattcgtgtcgctcaaggcgcactcccgttctggataatgttttttgcgccgacatcataacggttctggcaaatattctgaaatgagctgttgacaattaatcatccggctcgtataatgtgtggaattgtgagcggataacaatttcacacaggaaacagaccatgagggaagcgttgatcgccgaagtatcgactcaactatcagaggtagttggcgtcatcgagcgccatctcgaaccgacgttgctggccgtacatttgtacggctccgcagtggatggcggcctgaagccacacagtgatattgatttgctggttacggtgaccgtaaggcttgatgaaacaacgcggcgagctttgatcaacgaccttttggaaacttcggcttcccctggagagagcgagattctccgcgctgtagaagtcaccattgttgtgcacgacgacatcattccgtggcgttatccagctaagcgcgaactgcaatttggagaatggcagcgcaatgacattcttgcaggtatcttcgagccagccacgatcgacattgatctggctatcttgctgacaaaagcaagagaacatagcgttgccttggtaggtccagcggcggaggaactctttgatccggttcctgaacaggatctatttgaggcgctaaatgaaaccttaacgctatggaactcgccgcccgactgggctggcgatgagcgaaatgtagtgcttacgttgtcccgcatttggtacagcgcagtaaccggcaaaatcgcgccgaaggatgtcgctgccgactgggcaatggagcgcctgccggcccagtatcagcccgtcatacttgaagctaggcaggcttatcttggacaagaagatcgcttggcctcgcgcgcagatcagttggaagaatttgttcactacgtgaaaggcgagatcaccaaagtagtcggcaaataaagctctagtggatctccgtacccagggatctggctcgcggcggacgcacgacgccggggcgagaccataggcgatctcctaaatcaatagtagctgtaacctcgaagcgtttcacttgtaacaacgattgagaatttttgtcataaaattgaaatacttggttcgcatttttgtcatccgcggtcagccgcaattctgacgaactgcccatttagctggagatgattgtacatccttcacgtgaaaatttctcaagcgctgtgaacaagggttcagattttagattgaaaggtgagccgttgaaacacgttcttcttgtcgatgacgacgtcgctatgcggcatcttattattgaataccttacgatccacgccttcaaagtgaccgcggtagccgacagcacccagttcacaagagtactctcttccgcgacggtcgatgtcgtggttgttgatctagatttaggtcgtgaagatgggctcgagatcgttcgtaatctggcggcaaagtctgatattccaatcataattatcagtggcgaccgccttgaggagacggataaagttgttgcactcgagctaggagcaagtgattttatcgctaagccgttcagtatcagagagtttctagcacgcattcgggttgccttgcgcgtgcgccccaacgttgtccgctccaaagaccgacggtctttttgttttactgactggacacttaatctcaggcaacgtcgcttgatgtccgaagctggcggtgaggtgaaacttacggcaggtgagttcaatcttctcctcgcgtttttagagaaaccccgcgacgttctatcgcgcgagcaacttctcattgccagtcgagtacgcgacgaggaggtttatgacaggagtatagatgttctcattttgaggctgcgccgcaaacttgaggcagatccgtcaagccctcaactgataaaaacagcaagaggtgccggttatttctttgacgcggacgtgcaggtttcgcacggggggacgatggcagcctgagccaattcccagatccccgaggaatcggcgtgagcggtcgcaaaccatccggcccggtacaaatcggcgcggcgctgggtgatgacctggtggagaagttgaaggccgcgcaggccgcccagcggcaacgcatcgaggcagaagcacgccccggtgaatcgtggcaagcggccgctgatcgaatccgcaaagaatcccggcaaccgccggcagccggtgcgccgtcgattaggaagccgcccaagggcgacgagcaaccagattttttcgttccgatgctctatgacgtgggcacccgcgatagtcgcagcatcatggacgtggccgttttccgtctgtcgaagcgtgaccgacgagctggcgaggtgatccgctacgagcttccagacgggcacgtagaggtttccgcagggccggccggcatggccagtgtgtgggattacgacctggtactgatggcggtttcccatctaaccgaatccatgaaccgataccgggaagggaagggagacaagcccggccgcgtgttccgtccacacgttgcggacgtactcaagttctgccggcgagccgatggcggaaagcagaaagacgacctggtagaaacctgcattcggttaaacaccacgcacgttgccatgcagcgtacgaagaaggccaagaacggccgcctggtgacggtatccgagggtgaagccttgattagccgctacaagatcgtaaagagcgaaaccgggcggccggagtacatcgagatcgagctggctgattggatgtaccgcgagatcacagaaggcaagaacccggacgtgctgacggttcaccccgattactttttgatcgatcccggcatcggccgttttctctaccgcctggcacgccgcgccgcaggcaaggcagaagccagatggttgttcaagacgatctacgaacgcagtggcagcgccggagagttcaagaagttctgtttcaccgtgcgcaagctgatcgggtcaaatgacctgccggagtacgatttgaaggaggaggcggggcaggctggcccgatcctagtcatgcgctaccgcaacctgatcgagggcgaagcatccgccggttcctaatgtacggagcagatgctagggcaaattgccctagcaggggaaaaaggtcgaaaaggtctctttcctgtggatagcacgtacattgggaacccaaagccgtacattgggaaccggaacccgtacattgggaacccaaagccgtacattgggaaccggtcacacatgtaagtgactgatataaaagagaaaaaaggcgatttttccgcctaaaactctttaaaacttattaaaactcttaaaacccgcctggcctgtgcataactgtctggccagcgcacagccgaagagctgcaaaaagcgcctacccttcggtcgctgcgctccctacgccccgccgcttcgcgtcggcctatcgcggccgctggccgctcaaaaatggctggcctacggccaggcaatctaccagggcgcggacaagccgcgccgtcgccactcgaccgccggcgctgaggtctgcctcgtgaagaaggtgttgctgactcataccaggcctgaatcgccccatcatccagccagaaagtgagggagccacggttgatgagagctttgttgtaggtggaccagttggtgattttgaacttttgctttgccacggaacggtctgcgttgtcgggaagatgcgtgatctgatccttcaactcagcaaaagttcgatttattcaacaaagccgccgtcccgtcaagtcagcgtaatgctctgccagtgttacaaccaattaaccaattctgattagaaaaactcatcgagcatcaaatgaaactgcaatttattcatatcaggattatcaataccatatttttgaaaaagccgtttctgtaatgaaggagaaaactcaccgaggcagttccataggatggcaagatcctggtatcggtctgcgattccgactcgtccaacatcaatacaacctattaatttcccctcgtcaaaaataaggttatcaagtgagaaatcaccatgagtgacgactgaatccggtgagaatggcaaaagctctgcattaatgaatcggccaacgcgcggggagaggcggtttgcgtattgggcgctcttccgcttcctcgctcactgactcgctgcgctcggtcgttcggctgcggcgagcggtatcagctcactcaaaggcggtaatacggttatccacagaatcaggggataacgcaggaaagaacatgtgagcaaaaggccagcaaaaggccaggaaccgtaaaaaggccgcgttgctggcgtttttccataggctccgcccccctgacgagcatcacaaaaatcgacgctcaagtcagaggtggcgaaacccgacaggactataaagataccaggcgtttccccctggaagctccctcgtgcgctctcctgttccgaccctgccgcttaccggatacctgtccgcctttctcccttcgggaagcgtggcgctttctcatagctcacgctgtaggtatctcagttcggtgtaggtcgttcgctccaagctgggctgtgtgcacgaaccccccgttcagcccgaccgctgcgccttatccggtaactatcgtcttgagtccaacccggtaagacacgacttatcgccactggcagcagccactggtaacaggattagcagagcgaggtatgtaggcggtgctacagagttcttgaagtggtggcctaactacggctacactagaagaacagtatttggtatctgcgctctgctgaagccagttaccttcggaaaaagagttggtagctcttgatccggcaaacaaaccaccgctggtagcggtggtttttttgtttgcaagcagcagattacgcgcagaaaaaaaggatctcaagaagatcctttgatcttttctacggggtctgacgctcagtggaacgaaaactcacgttaagggattttggtcatgagattatcaaaaaggatcttcacctagatccttttgatccggaatta

SEQ ID NO: 28 - DNA, 17531 bp, synthetic construct
  source 1..17531: mol_type = other DNA
attcctgtggttggcatgcacatacaaatggacgaacggataaaccttttcacgcccttttaaatatccgattattctaataaacgctcttttctcttaggtttacccgccaatatatcctgtcaaacactgatagtttaaactggcactagcctaacggtgttgactaactaggccgcttccctaattagctaacccgggggcgcgccgggaccggaattcattatgtggtctaggtaggttctatatataagaaaacttgaaatgttctaaaaaaaaattcaagcccatgcatgattgaagcaaacggtatagcaacggtgttaacctgatctagtgatctcttgcaatccttaacggccacctaccgcaggtagcaaacggcgtccccctcctcgatatctccgcggcgacctctggctttttccgcggaattgcgcggtggggacggattccacgagaccgcgacgcaaccgcctctcgccgctgggccccacaccgctcggtgccgtagcctcacgggactctttctccctcctcccccgttataaattggcttcatcccctccttgcctcatccatccaaatcccagtccccaatcccatcccttcgtaggagaaattcatcgaagctaagcgaatcctcgcgatcctctcaaggtactgcgagttttcgatccccctctcgacccctcgtatgtttgtgtttgtcgtagcgtttgattaggtatgctttccctgtttgtgttcgtcgtagcgtttgattaggtatgctttccctgttcgtgttcatcgtagtgtttgattaggtcgtgtgaggcgatggcctgctcgcgtccttcgatctgtagtcgatttgcgggtcgtggtgtagatctgcgggctgtgatgaagttatttggtgtgatctgctcgcctgattctgcgggttggctcgagtagatatgatggttggaccggttggttcgtttaccgcgctagggttgggctgggatgatgttgcatgcgccgttgcgcgtgatcccgcagcaggacttgcgtttgattgccagatctcgttacgattatgtgatttggtttggactttttagatctgtagcttctgcttatgtgccagatgcgcctactgctcatatgcctgatgataatcataaatggctgtggaactaactagttgattgcggagtcatgtatcagctacaggtgtagggactagctacaggtgtagggacttgcgtctaattgtttggtcctttactcatgttgcaattatgcaatttagtttagattgtttgttccactcatctaggctgtaaaagggacactgcttagattgctgtttaatctttttagtagattatattatattggtaacttattacccctattacatgccatacgtgacttctgctcatgcctgatgataatcatagatcactgtggaattaattagttgattgttgaatcatgtttcatgtacataccacggcacaattgcttagttccttaacaaatgcaaattttactgatccatgtatgatttgcgtggttctctaatgtgaaatactatagctacttgttagtaagaatcaggttcgtatgcttaatgctgtatgtgccttctgctcatgcctgatgataatcatatatcactggaattaattagttgatcgtttaatcatatatcaagtacataccatgccacaatttttagtcacttaacccatgcagattgaactggtccctgcatgttttgctaaattgttctattctgattagaccatatatcatgtatttttttttggtaatggttctcttattttaaatgctatatagttctggtacttgttagaaagatctgcttcatagtttagttgcctatccctcgaattaggatgctgagcagctgatcctatagctttgtttcatgtatcaattcttttgtgttcaacagtcagtttttgttagattcattgtaacttatggtcgcttactcttctggtcctcaatgcttgcagggatcccctaaatagaccatgccgaagaagaagcgcaaggtcgggggcgggggctcaggcgggggcgggagcggcggcgggggctctgggggcggcggcagcggcgggggcggcagcgggggcggcgggtcgatgctgttccaggatttcactcatctgtaccctctctcaaagactgttcggttcgagctcaagcctattgggcggactctggagcacatccacgcgaagaacttcctcagccaggacgaaaccatggccgacatgtaccagaaggtcaaggtcatcctcgacgactaccacagggacttcatcgcggacatgatgggcgaggtgaagctgacgaagctcgccgagttctacgacgtctacctcaagttccgcaagaacccgaaggacgacggcctccagaagcagctcaaggacctgcaggccgtcctgaggaaggagtccgtcaagcccatcggcagcggcggcaagtacaagaccggctacgacaggctgttcggcgccaagctgttcaaggacggcaaggagctcggcgacctggcgaagttcgtgatcgcgcaggagggcgagagctcccccaagctggcccacctggcccacttcgagaagttcagcacgtacttcaccggcttccacaggaacaggaagaacatgtacagcgacgaggacaagcacacggccatcgcctaccgcctcatccacgagaacctgccccgcttcatcgacaacctgcagatcctgacgaccatcaagcagaagcactccgccctgtacgaccagatcatcaacgagctcaccgcgagcggcctcgacgtgtccctcgccagccacctcgacggctaccacaagctcctgacccaggagggcatcaccgcctacaaccgcatcatcggcgaggtgaacggctacaccaacaagcacaaccagatctgccacaagtccgagaggatcgccaagctcaggcccctgcacaagcagatcctcagcgacggcatgggcgtgagcttcctcccgtccaagttcgccgacgactccgagatgtgccaggccgtgaacgagttctacaggcactacaccgacgtgttcgccaaggtgcagtccctgttcgacggcttcgacgaccaccagaaggacggcatctacgtggagcacaagaacctgaacgagctgtccaagcaggccttcggcgacttcgccctcctgggccgcgtgctggacggctactacgtggacgtcgtgaacccggagttcaacgagcgcttcgcgaaggcgaagacggacaacgcgaaggccaagctcaccaaggagaaggacaagttcatcaagggcgtccacagcctcgcgtccctggagcaggcgatcgagcaccacaccgcgcgccacgacgacgagtccgtgcaggccggcaagctcggccagtacttcaagcacggcctggccggcgtcgacaacccgatccagaagatccacaacaaccactccaccatcaagggcttcctggagagggagcgcccggcgggcgagcgcgcgctccccaagatcaagtccggcaagaaccccgagatgacgcagctcaggcagctgaaggagctgctcgacaacgcgctcaacgtggcgcacttcgccaagctgctcacgaccaagaccacgctggacaaccaggacggcaacttctacggcgagttcggcgtcctgtacgacgagctggcgaagatcccgaccctgtacaacaaggtccgcgactacctgagccagaagcccttctccaccgagaagtacaagctcaacttcggcaacccgaccctcctgaacggctgggacctcaacaaggagaaggacaacttcggcgtgatcctccagaaggacggctgctactacctcgccctgctggacaaggcgcacaagaaggtcttcgacaacgccccgaacaccggcaagaacgtgtaccagaagatggtgtacaagctgctccccggccccaacaagatgctgccgaaggtgttcttcgcgaagtccaacctcgactactacaaccccagcgccgagctcctggacaagtacgccaagggcacgcacaagaagggcgacaacttcaacctcaaggactgccacgcgctgatcgacttcttcaaggcgggcatcaacaagcaccccgagtggcagcacttcggcttcaagttcagcccgacctccagctacagggacctcagcgacttctaccgcgaggtggagccccagggctaccaggtgaagttcgtcgacatcaacgccgactacatcgacgagctcgtcgagcagggcaagctctacctgttccagatctacaacaaggacttctccccgaaggcccacggcaagccgaacctccacacgctctacttcaaggccctcttcagcgaggacaacctggccgacccgatctacaagctcaacggcgaggcgcagatcttctaccgcaaggccagcctggacatgaacgaaacgaccatccacagggccggcgaggtcctggccaacaagaacccggacaacccgaagaagaggcagttcgtctacgacatcatcaaggacaagaggtacacccaggacaagttcatgctccacgtcccgatcaccatgaacttcggcgtccagggcatgaccatcaaggagttcaacaagaaggtcaaccagagcatccagcagtacgacgaggtgaacgtcatcggcatcgaccgcggcgagaggcacctgctctacctgacggtcatcaactccaagggcgagatcctcgagcagcgcagcctgaacgacatcacgaccgcgagcgccaacggcacgcaggtcaccacgccgtaccacaagatcctcgacaagcgcgagatcgagaggctgaacgcgcgcgtcggctggggcgagatcgaaacgatcaaggagctcaagtccggctacctcagccacgtcgtgcaccagatcaaccagctcatgctgaagtacaacgcgatcgtggtcctcgaggacctgaacttcggcttcaagaggggccgcttcaaggtggagaagcagatctaccagaacttcgagaacgccctgatcaagaagctcaaccacctggtcctcaaggacaaggcggacgacgagatcggcagctacaagaacgcgctccagctgaccaacaacttcacggacctcaagtccatcggcaagcagacgggcttcctgttctacgtgccggcgtggaacacctccaagatcgacccggaaaccggcttcgtcgacctgctcaagccgcgctacgagaacatcgcgcagtcccaggcgttcttcggcaagttcgacaagatctgctacaacaccgacaagggctacttcgagttccacatcgactacgcgaagttcaccgacaaggccaagaactccaggcagaagtgggccatctgcagccacggcgacaagcgctacgtgtacgacaagacggcgaaccagaacaagggcgcggccaagggcatcaacgtgaacgacgagctgaagtccctcttcgcgcgctaccacatcaacgacaagcagccgaacctcgtcatggacatctgccagaacaacgacaaggagttccacaagagcctgatgtgcctgctcaagaccctgctcgccctccgctactccaacgcgagctccgacgaggacttcatcctcagccccgtcgcgaacgacgagggcgtgttcttcaactccgccctcgcggacgacacgcagccgcagaacgccgacgcgaacggcgcctaccacatcgccctcaagggcctgtggctgctcaacgagctcaagaactccgacgacctgaacaaggtgaagctcgccattgacaaccagacgtggctgaatttcgctcagaatagggggggcgggggctcaggcgggggcgggagcggcggcgggggctctgggggcggcggcagcggcgggggcggcagcgggggcggcgggtcgccgaagaagaagcgcaaggtgtccggcggcagctccggcggcagcccgaagaagaagcgcaaagtgtgagggacccgatcgttcaaacatttggcaataaagtttcttaagattgaatcctgttgccggtcttgcgatgattatcatataatttctgttgaattacgttaagcatgtaataattaacatgtaatgcatgacgttatttatgagatgggtttttatgattagagtcccgcaattatacatttaatacgcgatagaaaacaaaatatagcgcgcaaactaggataaattatcgcgcgcggtgtcatctatgttactagatcggtaccgaattcattatgtggtctaggtaggttctatatataagaaaacttgaaatgttctaaaaaaaaattcaagcccatgcatgattgaagcaaacggtatagcaacggtgttaacctgatctagtgatctcttgcaatccttaacggccacctaccgcaggtagcaaacggcgtccccctcctcgatatctccgcggcgacctctggctttttccgcggaattgcgcggtggggacggattccacgagaccgcgacgcaaccgcctctcgccgctgggccccacaccgctcggtgccgtagcctcacgggactctttctccctcctcccccgttataaattggcttcatcccctccttgcctcatccatccaaatcccagtccccaatcccatcccttcgtaggagaaattcatcgaagctaagcgaatcctcgcgatcctctcaaggtactgcgagttttcgatccccctctcgacccctcgtatgtttgtgtttgtcgtagcgtttgattaggtatgctttccctgtttgtgttcgtcgtagcgtttgattaggtatgctttccctgttcgtgttcatcgtagtgtttgattaggtcgtgtgaggcgatggcctgctcgcgtccttcgatctgtagtcgatttgcgggtcgtggtgtagatctgcgggctgtgatgaagttatttggtgtgatctgctcgcctgattctgcgggttggctcgagtagatatgatggttggaccggttggttcgtttaccgcgctagggttgggctgggatgatgttgcatgcgccgttgcgcgtgatcccgcagcaggacttgcgtttgattgccagatctcgttacgattatgtgatttggtttggactttttagatctgtagcttctgcttatgtgccagatgcgcctactgctcatatgcctgatgataatcataaatggctgtggaactaactagttgattgcggagtcatgtatcagctacaggtgtagggactagctacaggtgtagggacttgcgtctaattgtttggtcctttactcatgttgcaattatgcaatttagtttagattgtttgttccactcatctaggctgtaaaagggacactgcttagattgctgtttaatctttttagtagattatattatattggtaacttattacccctattacatgccatacgtgacttctgctcatgcctgatgataatcatagatcactgtggaattaattagttgattgttgaatcatgtttcatgtacataccacggcacaattgcttagttccttaacaaatgcaaattttactgatccatgtatgatttgcgtggttctctaatgtgaaatactatagctacttgttagtaagaatcaggttcgtatgcttaatgctgtatgtgccttctgctcatgcctgatgataatcatatatcactggaattaattagttgatcgtttaatcatatatcaagtacataccatgccacaatttttagtcacttaacccatgcagattgaactggtccctgcatgttttgctaaattgttctattctgattagaccatatatcatgtatttttttttggtaatggttctcttattttaaatgctatatagttctggtacttgttagaaagatctgcttcatagtttagttgcctatccctcgaattaggatgctgagcagctgatcctatagctttgtttcatgtatcaattcttttgtgttcaacagtcagtttttgttagattcattgtaacttatggtcgcttactcttctggtcctcaatgcttgcagaagcttgaaattctgatgagtccgtgaggacgaaacgagtaagctcgtcaatttctactgtttgtagatgggaaagaccgaggagaagatctaatttctactgtttgtagatgcaccaaggaaggggaggagatcaatttctactgtttgtagatgtcacagatcacaaacttcaaatgaatttctactgtttgtagatacgcccagaaagcatacgcagtcggccggcatggtcccagcctcctcgctggcgccggctgggcaacatgcttcggcatggcgaatgggacgatcgttcaaacatttggcaataaagtttcttaagattgaatcctgttgccggtcttgcgatgattatcatataatttctgttgaattacgttaagcatgtaataattaacatgtaatgcatgacgttatttatgagatgggtttttatgattagagtcccgcaattatacatttaatacgcgatagaaaacaaaatatagcgcgcaaactaggataaattatcgcgcgcggtgtcatctatgttactagatccctaggctgcagtgcagcgtgacccggtcgtgcccctctctagagataatgagcattgcatgtctaagttataaaaaattaccacatattttttttgtcacacttgtttgaagtgcagtttatctatctttatacatatatttaaactttactctacgaataatataatctatagtactacaataatatcagtgttttagagaatcatataaatgaacagttagacatggtctaaaggacaattgagtattttgacaacaggactctacagttttatctttttagtgtgcatgtgttctcctttttttttgcaaatagcttcacctatataatacttcatccattttattagtacatccatttagggtttagggttaatggtttttatagactaatttttttagtacatctattttattctattttagcctctaaattaagaaaactaaaactctattttagtttttttatttaataatttagatataaaatagaataaaataaagtgactaaaaattaaacaaataccctttaagaaattaaaaaaactaaggaaacatttttcttgtttcgagtagataatgccagcctgttaaacgccgtcgacgagtctaacggacaccaaccagcgaaccagcagcgtcgcgtcgggccaagcgaagcagacggcacggcatctctgtcgctgcctctggacccctctcgagagttccgctccaccgttggacttgctccgctgtcggcatccagaaattgcgtggcggagcggcagacgtgagccggcacggcaggcggcctcctcctcctctcacggcaccggcagctacgggggattcctttcccaccgctccttcgctttcccttcctcgcccgccgtaataaatagacaccccctccacaccctctttccccaacctcgtgttgttcggagcgcacacacacacaaccagatctcccccaaatccacccgtcggcacctccgcttcaaggtacgccgctcgtcctccccccccccccctctctaccttctctagatcggcgttccggtccatggttagggcccggtagttctacttctgttcatgtttgtgttagatccgtgtttgtgttagatccgtgctgctagcgttcgtacacggatgcgacctgtacgtcagacacgttctgattgctaacttgccagtgtttctctttggggaatcctgggatggctctagccgttccgcagacgggatcgatttcatgattttttttgtttcgttgcatagggtttggtttgcccttttcctttatttcaatatatgccgtgcacttgtttgtcgggtcatcttttcatgcttttttttgtcttggttgtgatgatgtggtctggttgggcggtcgttctagatcggagtagaattctgtttcaaactacctggtggatttattaattttggatctgtatgtgtgtgccatacatattcatagttacgaattgaagatgatggatggaaatatcgatctaggataggtatacatgttgatgcgggttttactgatgcatatacagagatgctttttgttcgcttggttgtgatgatgtggtgtggttgggcggtcgttcattcgttctagatcggagtagaatactgtttcaaactacctggtgtatttattaattttggaactgtatgtgtgtgtcatacatcttcatagttacgagtttaagatggatggaaatatcgatctaggataggtatacatgttgatgtgggttttactgatgcatatacatgatggcatatgcagcatctattcatatgctctaaccttgagtacctatctattataataaacaagtatgttttataattattttgatcttgatatacttggatgatggcatatgcagcagctatatgtggatttttttagccctgccttcatacgctatttatttgcttggtactgtttcttttgtcgatgctcaccctgttgtttggtgttacttctgcagggatcaccgatcatgcaaaaactcattaactcagtgcaaaactatgcctggggcagcaaaacggcgttgactgaactttatggtatggaaaatccgtccagccagccgatggccgagctgtggatgggcgcacatccgaaaagcagttcacgagtgcagaatgccgccggagatatcgtttcactgcgtgatgtgattgagagtgataaatcgactctgctcggagaggccgttgccaaacgctttggcgaactgcctttcctgttcaaagtattatgcgcagcacagccactctccattcaggttcatccaaacaaacacaattctgaaatcggttttgccaaagaaaatgccgcaggtatcccgatggatgccgccgagcgtaactataaagatcctaaccacaagccggagctggtttttgcgctgacgcctttccttgcgatgaacgcgtttcgtgaattttccgagattgtctccctactccagccggtcgcaggtgcacatccggcgattgctcactttttacaacagcctgatgccgaacgtttaagcgaactgttcgccagcctgttgaatatgcagggtgaagaaaaatcccgcgcgctggcgattttaaaatcggccctcgatagccagcagggtgaaccgtggcaaacgattcgtttaatttctgaattttacccggaagacagcggtctgttctccccgctattgctgaatgtggtgaaattgaaccctggcgaagcgatgttcctgttcgctgaaacaccgcacgcttacctgcaaggcgtggcgctggaagtgatggcaaactccgataacgtgctgcgtgcgggtctgacgcctaaatacattgatattccggaactggttgccaatgtgaaattcgaagccaaaccggctaaccagttgttgacccagccggtgaaacaaggtgcagaactggacttcccgattccagtggatgattttgccttctcgctgcatgaccttagtgataaagaaaccaccattagccagcagagtgccgccattttgttctgcgtcgaaggcgatgcaacgttgtggaaaggttctcagcagttacagcttaaaccgggtgaatcagcgtttattgccgccaacgaatcaccggtgactgtcaaaggccacggccgtttagcgcgtgtttacaacaagctgtaagagcttactgaaaaaattaacatctcttgctaagctgggagctcgatccgtcgacctgcagatcgttcaaacatttggcaataaagtttcttaagattgaatcctgttgccggtcttgcgatgattatcatataatttctgttgaattacgttaagcatgtaataattaacatgtaatgcatgacgttatttatgagatgggtttttatgattagagtcccgcaattatacatttaatacgcgatagaaaacaaaatatagcgcgcaaactaggataaattatcgcgcgcggtgtcatctatgttactagatccggaccgcctgcaggcccgggggcgcgccctaattagctaacggccaggatcgccgcgtgagcctttagcaactagctagattaattaacgcaatctgttattaagttgtctaagcgtcaatttgtttacaccacaatatatcctgccaccagccagccaacagctccccgaccggcagctcggcacaaaatcaccactcgatacaggcagcccatcagaattaattctcatgtttgacagcttatcatcgactgcacggtgcaccaatgcttctggcgtcaggcagccatcggaagctgtggtatggctgtgcaggtcgtaaatcactgcataattcgtgtcgctcaaggcgcactcccgttctggataatgttttttgcgccgacatcataacggttctggcaaatattctgaaatgagctgttgacaattaatcatccggctcgtataatgtgtggaattgtgagcggataacaatttcacacaggaaacagaccatgagggaagcgttgatcgccgaagtatcgactcaactatcagaggtagttggcgtcatcgagcgccatctcgaaccgacgttgctggccgtacatttgtacggctccgcagtggatggcggcctgaagccacacagtgatattgatttgctggttacggtgaccgtaaggcttgatgaaacaacgcggcgagctttgatcaacgaccttttggaaacttcggcttcccctggagagagcgagattctccgcgctgtagaagtcaccattgttgtgcacgacgacatcattccgtggcgttatccagctaagcgcgaactgcaatttggagaatggcagcgcaatgacattcttgcaggtatcttcgagccagccacgatcgacattgatctggctatcttgctgacaaaagcaagagaacatagcgttgccttggtaggtccagcggcggaggaactctttgatccggttcctgaacaggatctatttgaggcgctaaatgaaaccttaacgctatggaactcgccgcccgactgggctggcgatgagcgaaatgtagtgcttacgttgtcccgcatttggtacagcgcagtaaccggcaaaatcgcgccgaaggatgtcgctgccgactgggcaatggagcgcctgccggcccagtatcagcccgtcatacttgaagctaggcaggcttatcttggacaagaagatcgcttggcctcgcgcgcagatcagttggaagaatttgttcactacgtgaaaggcgagatcaccaaagtagtcggcaaataaagctctagtggatctccgtacccagggatctggctcgcggcggacgcacgacgccggggcgagaccataggcgatctcctaaatcaatagtagctgtaacctcgaagcgtttcacttgtaacaacgattgagaatttttgtcataaaattgaaatacttggttcgcatttttgtcatccgcggtcagccgcaattctgacgaactgcccatttagctggagatgattgtacatccttcacgtgaaaatttctcaagcgctgtgaacaagggttcagattttagattgaaaggtgagccgttgaaacacgttcttcttgtcgatgacgacgtcgctatgcggcatcttattattgaataccttacgatccacgccttcaaagtgaccgcggtagccgacagcacccagttcacaagagtactctcttccgcgacggtcgatgtcgtggttgttgatctagatttaggtcgtgaagatgggctcgagatcgttcgtaatctggcggcaaagtctgatattccaatcataattatcagtggcgaccgccttgaggagacggataaagttgttgcactcgagctaggagcaagtgattttatcgctaagccgttcagtatcagagagtttctagcacgcattcgggttgccttgcgcgtgcgccccaacgttgtccgctccaaagaccgacggtctttttgttttactgactggacacttaatctcaggcaacgtcgcttgatgtccgaagctggcggtgaggtgaaacttacggcaggtgagttcaatcttctcctcgcgtttttagagaaaccccgcgacgttctatcgcgcgagcaacttctcattgccagtcgagtacgcgacgaggaggtttatgacaggagtatagatgttctcattttgaggctgcgccgcaaacttgaggcagatccgtcaagccctcaactgataaaaacagcaagaggtgccggttatttctttgacgcggacgtgcaggtttcgcacggggggacgatggcagcctgagccaattcccagatccccgaggaatcggcgtgagcggtcgcaaaccatccggcccggtacaaatcggcgcggcgctgggtgatgacctggtggagaagttgaaggccgcgcaggccgcccagcggcaacgcatcgaggcagaagcacgccccggtgaatcgtggcaagcggccgctgatcgaatccgcaaagaatcccggcaaccgccggcagccggtgcgccgtcgattaggaagccgcccaagggcgacgagcaaccagattttttcgttccgatgctctatgacgtgggcacccgcgatagtcgcagcatcatggacgtggccgttttccgtctgtcgaagcgtgaccgacgagctggcgaggtgatccgctacgagcttccagacgggcacgtagaggtttccgcagggccggccggcatggccagtgtgtgggattacgacctggtactgatggcggtttcccatctaaccgaatccatgaaccgataccgggaagggaagggagacaagcccggccgcgtgttccgtccacacgttgcggacgtactcaagttctgccggcgagccgatggcggaaagcagaaagacgacctggtagaaacctgcattcggttaaacaccacgcacgttgccatgcagcgtacgaagaaggccaagaacggccgcctggtgacggtatccgagggtgaagccttgattagccgctacaagatcgtaaagagcgaaaccgggcggccggagtacatcgagatcgagctggctgattggatgtaccgcgagatcacagaaggcaagaacccggacgtgctgacggttcaccccgattactttttgatcgatcccggcatcggccgttttctctaccgcctggcacgccgcgccgcaggcaaggcagaagccagatggttgttcaagacgatctacgaacgcagtggcagcgccggagagttcaagaagttctgtttcaccgtgcgcaagctgatcgggtcaaatgacctgccggagtacgatttgaaggaggaggcggggcaggctggcccgatcctagtcatgcgctaccgcaacctgatcgagggcgaagcatccgccggttcctaatgtacggagcagatgctagggcaaattgccctagcaggggaaaaaggtcgaaaaggtctctttcctgtggatagcacgtacattgggaacccaaagccgtacattgggaaccggaacccgtacattgggaacccaaagccgtacattgggaaccggtcacacatgtaagtgactgatataaaagagaaaaaaggcgatttttccgcctaaaactctttaaaacttattaaaactcttaaaacccgcctggcctgtgcataactgtctggccagcgcacagccgaagagctgcaaaaagcgcctacccttcggtcgctgcgctccctacgccccgccgcttcgcgtcggcctatcgcggccgctggccgctcaaaaatggctggcctacggccaggcaatctaccagggcgcggacaagccgcgccgtcgccactcgaccgccggcgctgaggtctgcctcgtgaagaaggtgttgctgactcataccaggcctgaatcgccccatcatccagccagaaagtgagggagccacggttgatgagagctttgttgtaggtggaccagttggtgattttgaacttttgctttgccacggaacggtctgcgttgtcgggaagatgcgtgatctgatccttcaactcagcaaaagttcgatttattcaacaaagccgccgtcccgtcaagtcagcgtaatgctctgccagtgttacaaccaattaaccaattctgattagaaaaactcatcgagcatcaaatgaaactgcaatttattcatatcaggattatcaataccatatttttgaaaaagccgtttctgtaatgaaggagaaaactcaccgaggcagttccataggatggcaagatcctggtatcggtctgcgattccgactcgtccaacatcaatacaacctattaatttcccctcgtcaaaaataaggttatcaagtgagaaatcaccatgagtgacgactgaatccggtgagaatggcaaaagctctgcattaatgaatcggccaacgcgcggggagaggcggtttgcgtattgggcgctcttccgcttcctcgctcactgactcgctgcgctcggtcgttcggctgcggcgagcggtatcagctcactcaaaggcggtaatacggttatccacagaatcaggggataacgcaggaaagaacatgtgagcaaaaggccagcaaaaggccaggaaccgtaaaaaggccgcgttgctggcgtttttccataggctccgcccccctgacgagcatcacaaaaatcgacgctcaagtcagaggtggcgaaacccgacaggactataaagataccaggcgtttccccctggaagctccctcgtgcgctctcctgttccgaccctgccgcttaccggatacctgtccgcctttctcccttcgggaagcgtggcgctttctcatagctcacgctgtaggtatctcagttcggtgtaggtcgttcgctccaagctgggctgtgtgcacgaaccccccgttcagcccgaccgctgcgccttatccggtaactatcgtcttgagtccaacccggtaagacacgacttatcgccactggcagcagccactggtaacaggattagcagagcgaggtatgtaggcggtgctacagagttcttgaagtggtggcctaactacggctacactagaagaacagtatttggtatctgcgctctgctgaagccagttaccttcggaaaaagagttggtagctcttgatccggcaaacaaaccaccgctggtagcggtggtttttttgtttgcaagcagcagattacgcgcagaaaaaaaggatctcaagaagatcctttgatcttttctacggggtctgacgctcagtggaacgaaaactcacgttaagggattttggtcatgagattatcaaaaaggatcttcacctagatccttttgatccggaatta

SEQ ID NO: 29 - protein, 6 aa, Acidaminococcus sp.
  source 1..6: note = subsp. BV3L6
RMKRMA

SEQ ID NO: 30 - protein, 6 aa, Francisella sp.
  source 1..6: note = subsp. novicida U112
IPKKIT

SEQ ID NO: 31 - protein, 8 aa, Moraxella bovoculi
LDMNETTI

SEQ ID NO: 32 - protein, 39 aa, Acidaminococcus sp.; identical to SEQ ID NO: 23
  source 1..39: note = subsp. BV3L6

SEQ ID NO: 33 - protein, 5 aa, Francisella sp.
  source 1..5: note = subsp. novicida U112
ESVFE

SEQ ID NO: 34 - protein, 4 aa, Moraxella bovoculi
RQFV

SEQ ID NO: 35 - protein, 1341 aa, synthetic construct
MPKKKRKVGGGGSGGGGSGGGGSGGGGSGGGGSGGGGSMLFQDFTHLYPLSKTVRFELKPIGRTLEHIHAKNFLSQDETMADMYQKVKVILDDYHRDFIADMMGEVKLTKLAEFYDVYLKFRKNPKDDGLQKQLKDLQAVLRKESVKPIGSGGKYKTGYDRLFGAKLFKDGKELGDLAKFVIAQEGESSPKLAHLAHFEKFSTYFTGFHRNRKNMYSDEDKHTAIAYRLIHENLPRFIDNLQILTTIKQKHSALYDQIINELTASGLDVSLASHLDGYHKLLTQEGITAYNRIIGEVNGYTNKHNQICHKSERIAKLRPLHKQILSDGMGVSFLPSKFADDSEMCQAVNEFYRHYTDVFAKVQSLFDGFDDHQKDGIYVEHKNLNELSKQAFGDFALLGRVLDGYYVDVVNPEFNERFAKAKTDNAKAKLTKEKDKFIKGVHSLASLEQAIEHHTARHDDESVQAGKLGQYFKHGLAGVDNPIQKIHNNHSTIKGFLERERPAGERALPKIKSGKNPEMTQLRQLKELLDNALNVAHFAKLLTTKTTLDNQDGNFYGEFGVLYDELAKIPTLYNKVRDYLSQKPFSTEKYKLNFGNPTLLNGWDLNKEKDNFGVILQKDGCYYLALLDKAHKKVFDNAPNTGKNVYQKMVYKLLPGPNKMLPKVFFAKSNLDYYNPSAELLDKYAKGTHKKGDNFNLKDCHALIDFFKAGINKHPEWQHFGFKFSPTSSYRDLSDFYREVEPQGYQVKFVDINADYIDELVEQGKLYLFQIYNKDFSPKAHGKPNLHTLYFKALFSEDNLADPIYKLNGEAQIFYRKASLDMNETTIHRAGEVLANKNPDNPKKRQFVYDIIKDKRYTQDKFMLHVPITMNFGVQGMTIKEFNKKVNQSIQQYDEVNVIGIDRGERHLLYLTVINSKGEILEQRSLNDITTASANGTQVTTPYHKILDKREIERLNARVGWGEIETIKELKSGYLSHVVHQINQLMLKYNAIVVLEDLNFGFKRGRFKVEKQIYQNFENALIKKLNHLVLKDKADDEIGSYKNALQLTNNFTDLKSIGKQTGFLFYVPAWNTSKIDPETGFVDLLKPRYENIAQSQAFFGKFDKICYNTDKGYFEFHIDYAKFTDKAKNSRQKWAICSHGDKRYVYDKTANQNKGAAKGINVNDELKSLFARYHINDKQPNLVMDICQNNDKEFHKSLMCLLKTLLALRYSNASSDEDFILSPVANDEGVFFNSALADDTQPQNADANGAYHIALKGLWLLNELKNSDDLNKVKLAIDNQTWLNFAQNRGGGGSGGGGSGGGGSGGGGSGGGGSGGGGSPKKKRKVSGGSSGGSPKKKRKV

SEQ ID NO: 36 - protein, 1341 aa, synthetic construct
MPKKKRKVGGGGSGGGGSGGGGSGGGGSGGGGSGGGGSMLFQDFTHLYPLSKTVRFELKPIGRTLEHIHAKNFLSQDETMADMYQKVKVILDDYHRDFIADMMGEVKLTKLAEFYDVYLKFRKNPKDDGLQKQLKDLQAVLRKESVKPIGSGGKYKTGYDRLFGAKLFKDGKELGDLAKFVIAQEGESSPKLAHLAHFEKFSTYFTGFHRNRKNMYSDEDKHTAIAYRLIHENLPRFIDNLQILTTIKQKHSALYDQIINELTASGLDVSLASHLDGYHKLLTQEGITAYNRIIGEVNGYTNKHNQICHKSERIAKLRPLHKQILSDGMGVSFLPSKFADDSEMCQAVNEFYRHYTDVFAKVQSLFDGFDDHQKDGIYVEHKNLNELSKQAFGDFALLGRVLDGYYVDVVNPEFNERFAKAKTDNAKAKLTKEKDKFIKGVHSLASLEQAIEHHTARHDDESVQAGKLGQYFKHGLAGVDNPIQKIHNNHSTIKGFLERERPAGERALPKIKSGKNPEMTQLRQLKELLDNALNVAHFAKLLTTKTTLDNQDGNFYGEFGVLYDELAKIPTLYNKVRDYLSQKPFSTEKYKLNFGNPTLLNGWDLNKEKDNFGVILQKDGCYYLALLDKAHKKVFDNAPNTGKNVYQKMVYKLLPGPNKMLPKVFFAKSNLDYYNPSAELLDKYAKGTHKKGDNFNLKDCHALIDFFKAGINKHPEWQHFGFKFSPTSSYRDLSDFYREVEPQGYQVKFVDINADYIDELVEQGKLYLFQIYNKDFSPKAHGKPNLHTLYFKALFSEDNLADPIYKLNGEAQIFYRKASLKKEELVVHRAGEVLENKNPDNPKKRQFVYDIIKDKRYTQDKFMLHVPITMNFGVQGMTIKEFNKKVNQSIQQYDEVNVIGIDRGERHLLYLTVINSKGEILEQRSLNDITTASANGTQVTTPYHKILDKREIERLNARVGWGEIETIKELKSGYLSHVVHQINQLMLKYNAIVVLEDLNFGFKRGRFKVEKQIYQNFENALIKKLNHLVLKDKADDEIGSYKNALQLTNNFTDLKSIGKQTGFLFYVPAWNTSKIDPETGFVDLLKPRYENIAQSQAFFGKFDKICYNTDKGYFEFHIDYAKFTDKAKNSRQKWAICSHGDKRYVYDKTANQNKGAAKGINVNDELKSLFARYHINDKQPNLVMDICQNNDKEFHKSLMCLLKTLLALRYSNASSDEDFILSPVANDEGVFFNSALADDTQPQNADANGAYHIALKGLWLLNELKNSDDLNKVKLAIDNQTWLNFAQNRGGGGSGGGGSGGGGSGGGGSGGGGSGGGGSPKKKRKVSGGSSGGSPKKKRKV

SEQ ID NO: 37 - protein, 1342 aa, synthetic construct
MPKKKRKVGGGGSGGGGSGGGGSGGGGSGGGGSGGGGSMLFQDFTHLYPLSKTVRFELKPIGRTLEHIHAKNFLSQDETMADMYQKVKVILDDYHRDFIADMMGEVKLTKLAEFYDVYLKFRKNPKDDGLQKQLKDLQAVLRKESVKPIGSGGKYKTGYDRLFGAKLFKDGKELGDLAKFVIAQEGESSPKLAHLAHFEKFSTYFTGFHDNRKNMYSDEDKHTAIAYRLIHENLPRFIDNLQILTTIKQKHSALYDQIINELTASGLDVSLASHLDGYHKLLTQEGITAYNRIIGEVNGYTNKHNQICHKSERIAKLRPLHKQILSDGMGVSFLPSKFADDSEMCQAVNEFYRHYTDVFAKVQSLFDGFDDHQKDGIYVEHKNLNELSKQAFGDFALLGRVLDGYYVDVVNPEFNERFAKAKTDNAKAKLTKEKDKFIKGVHSLASLEQAIEHHTARHDDESVQAGKLGQYFKHGLAGVDNPIQKIHNNHSTIKGFLERERPAGERALPKIKSGKNPEMTQLRQLKELLDNALNVAHFAKLLTTKTTLDNQDGNFYGEFGVLYDELAKIPTLYNKVRDYLSQKPFSTEKYKLNFGNPTLLNGWDLNKEKDNFGVILQKDGCYYLALLDKAHKKVFDNAPNTGKNVYQKMVYKLLPGPNKMLPKVFFAKSNLDYYNPSAELLDKYAKGTHKKGDNFNLKDCHALIDFFKAGINKHPEWQHFGFKFSPTSSYRDLSDFYREVEPQGYQVKFVDINADYIDELVEQGKLYLFQIYNKDFSPKAHGKPNLHTLYFKALFSEDNLADPIYKLNGEAQIFYRKASLDMNETTIHRAGEVLENKNPDNPKKTTTLSYDIIKDKRYTQDKFMLHVPITMNFGVQGMTIKEFNKKVNQSIQQYDEVNVIGIDRGERHLLYLTVINSKGEILEQRSLNDITTASANGTQVTTPYHKILDKREIERLNARVGWGEIETIKELKSGYLSHVVHQINQLMLKYNAIVVLEDLNFGFKRGRFKVEKQIYQNFENALIKKLNHLVLKDKADDEIGSYKNALQLTNNFTDLKSIGKQTGFLFYVPAWNTSKIDPETGFVDLLKPRYENIAQSQAFFGKFDKICYNTDKGYFEFHIDYAKFTDKAKNSRQKWAICSHGDKRYVYDKTANQNKGAAKGINVNDELKSLFARYHINDKQPNLVMDICQNNDKEFHKSLMCLLKTLLALRYSNASSDEDFILSPVANDEGVFFNSALADDTQPQNADANGAYHIALKGLWLLNELKNSDDLNKVKLAIDNQTWLNFAQNRGGGGSGGGGSGGGGSGGGGSGGGGSGGGGSPKKKRKVSGGSSGGSPKKKRKV

SEQ ID NO: 38 - DNA, 17531 bp, synthetic construct
  source 1..17531: mol_type = other DNA
attcctgtggttggcatgcacatacaaatggacgaacggataaaccttttcacgcccttttaaatatccgattattctaataaacgctcttttctcttaggtttacccgccaatatatcctgtcaaacactgatagtttaaactggcactagcctaacggtgttgactaactaggccgcttccctaattagctaacccgggggcgcgccgggaccggaattcattatgtggtctaggtaggttctatatataagaaaacttgaaatgttctaaaaaaaaattcaagcccatgcatgattgaagcaaacggtatagcaacggtgttaacctgatctagtgatctcttgcaatccttaacggccacctaccgcaggtagcaaacggcgtccccctcctcgatatctccgcggcgacctctggctttttccgcggaattgcgcggtggggacggattccacgagaccgcgacgcaaccgcctctcgccgctgggccccacaccgctcggtgccgtagcctcacgggactctttctccctcctcccccgttataaattggcttcatcccctccttgcctcatccatccaaatcccagtccccaatcccatcccttcgtaggagaaattcatcgaagctaagcgaatcctcgcgatcctctcaaggtactgcgagttttcgatccccctctcgacccctcgtatgtttgtgtttgtcgtagcgtttgattaggtatgctttccctgtttgtgttcgtcgtagcgtttgattaggtatgctttccctgttcgtgttcatcgtagtgtttgattaggtcgtgtgaggcgatggcctgctcgcgtccttcgatctgtagtcgatttgcgggtcgtggtgtagatctgcgggctgtgatgaagttatttggtgtgatctgctcgcctgattctgcgggttggctcgagtagatatgatggttggaccggttggttcgtttaccgcgctagggttgggctgggatgatgttgcatgcgccgttgcgcgtgatcccgcagcaggacttgcgtttgattgccagatctcgttacgattatgtgatttggtttggactttttagatctgtagcttctgcttatgtgccagatgcgcctactgctcatatgcctgatgataatcataaatggctgtggaactaactagttgattgcggagtcatgtatcagctacaggtgtagggactagctacaggtgtagggacttgcgtctaattgtttggtcctttactcatgttgcaattatgcaatttagtttagattgtttgttccactcatctaggctgtaaaagggacactgcttagattgctgtttaatctttttagtagattatattatattggtaacttattacccctattacatgccatacgtgacttctgctcatgcctgatgataatcatagatcactgtggaattaattagttgattgttgaatcatgtttcatgtacataccacggcacaattgcttagttccttaacaaatgcaaattttactgatccatgtatgatttgcgtggttctctaatgtgaaatactatagctacttgttagtaagaatcaggttcgtatgcttaatgctgtatgtgccttctgctcatgcctgatgataatcatatatcactggaattaattagttgatcgtttaatcatatatcaagtacataccatgccacaatttttagtcacttaacccatgcagattgaactggtccctgcatgttttgctaaattgttctattctgattagaccatatatcatgtatttttttttggtaatggttctcttattttaaatgctatatagttctggtacttgttagaaagatctgcttcatagtttagttgcctatccctcgaattaggatgctgagcagctgatcctatagctttgtttcatgtatcaattcttttgtgttcaacagtcagtttttgttagattcattgtaacttatggtcgcttactcttctggtcctcaatgcttgcagggatcccctaaatagaccatgccgaagaagaagcgcaaggtcgggggcgggggctcaggcgggggcgggagcggcggcgggggctctgggggcggcggcagcggcgggggcggcagcgggggcggcgggtcgatgctgttccaggatttcactcatctgtaccctctctcaaagactgttcggttcgagctcaagcctattgggcggactctggagcacatccacgcgaagaacttcctcagccaggacgaaaccatggccgacatgtaccagaaggtcaaggtcatcctcgacgactaccacagggacttcatcgcggacatgatgggcgaggtgaagctgacgaagctcgccgagttctacgacgtctacctcaagttccgcaagaacccgaaggacgacggcctccagaagcagctcaaggacctgcaggccgtcctgaggaaggagtccgtcaagcccatcggcagcggcggcaagtacaagaccggctacgacaggctgttcggcgccaagctgttcaaggacggcaaggagctcggcgacctggcgaagttcgtgatcgcgcaggagggcgagagctcccccaagctggcccacctggcccacttcgagaagttcagcacgtacttcaccggcttccacaggaacaggaagaacatgtacagcgacgaggacaagcacacggccatcgcctaccgcctcatccacgagaacctgccccgcttcatcgacaacctgcagatcctgacgaccatcaagcagaagcactccgccctgtacgaccagatcatcaacgagctcaccgcgagcggcctcgacgtgtccctcgccagccacctcgacggctaccacaagctcctgacccaggagggcatcaccgcctacaaccgcatcatcggcgaggtgaacggctacaccaacaagcacaaccagatctgccacaagtccgagaggatcgccaagctcaggcccctgcacaagcagatcctcagcgacggcatgggcgtgagcttcctcccgtccaagttcgccgacgactccgagatgtgccaggccgtgaacgagttctacaggcactacaccgacgtgttcgccaaggtgcagtccctgttcgacggcttcgacgaccaccagaaggacggcatctacgtggagcacaagaacctgaacgagctgtccaagcaggccttcggcgacttcgccctcctgggccgcgtgctggacggctactacgtggacgtcgtgaacccggagttcaacgagcgcttcgcgaaggcgaagacggacaacgcgaaggccaagctcaccaaggagaaggacaagttcatcaagggcgtccacagcctcgcgtccctggagcaggcgatcgagcaccacaccgcgcgccacgacgacgagtccgtgcaggccggcaagctcggccagtacttcaagcacggcctggccggcgtcgacaacccgatccagaagatccacaacaaccactccaccatcaagggcttcctggagagggagcgcccggcgggcgagcgcgcgctccccaagatcaagtccggcaagaaccccgagatgacgcagctcaggcagctgaaggagctgctcgacaacgcgctcaacgtggcgcacttcgccaagctgctcacgaccaagaccacgctggacaaccaggacggcaacttctacggcgagttcggcgtcctgtacgacgagctggcgaagatcccgaccctgtacaacaaggtccgcgactacctgagccagaagcccttctccaccgagaagtacaagctcaacttcggcaacccgaccctcctgaacggctgggacctcaacaaggagaaggacaacttcggcgtgatcctccagaaggacggctgctactacctcgccctgctggacaaggcgcacaagaaggtcttcgacaacgccccgaacaccggcaagaacgtgtaccagaagatggtgtacaagctgctccccggccccaacaagatgctgccgaaggtgttcttcgcgaagtccaacctcgactactacaaccccagcgccgagctcctggacaagtacgccaagggcacgcacaagaagggcgacaacttcaacctcaaggactgccacgcgctgatcgacttcttcaaggcgggcatcaacaagcaccccgagtggcagcacttcggcttcaagttcagcccgacctccagctacagggacctcagcgacttctaccgcgaggtggagccccagggctaccaggtgaagttcgtcgacatcaacgccgactacatcgacgagctcgtcgagcagggcaagctctacctgttccagatctacaacaaggacttctccccgaaggcccacggcaagccgaacctccacacgctctacttcaaggccctcttcagcgaggacaacctggccgacccgatctacaagctcaacggcgaggcgcagatcttctaccgcaaggccagcctgaagaaggaggagctggtggtccacagggccggcgaggtcctggagaacaagaacccggacaacccgaagaagaggcagttcgtctacgacatcatcaaggacaagaggtacacccaggacaagttcatgctccacgtcccgatcaccatgaacttcggcgtccagggcatgaccatcaaggagttcaacaagaaggtcaaccagagcatccagcagtacgacgaggtgaacgtcatcggcatcgaccgcggcgagaggcacctgctctacctgacggtcatcaactccaagggcgagatcctcgagcagcgcagcctgaacgacatcacgaccgcgagcgccaacggcacgcaggtcaccacgccgtaccacaagatcctcgacaagcgcgagatcgagaggctgaacgcgcgcgtcggctggggcgagatcgaaacgatcaaggagctcaagtccggctacctcagccacgtcgtgcaccagatcaaccagctcatgctgaagtacaacgcgatcgtggtcctcgaggacctgaacttcggcttcaagaggggccgcttcaaggtggagaagcagatctaccagaacttcgagaacgccctgatcaagaagctcaaccacctggtcctcaaggacaaggcggacgacgagatcggcagctacaagaacgcgctccagctgaccaacaacttcacggacctcaagtccatcggcaagcagacgggcttcctgttctacgtgccggcgtggaacacctccaagatcgacccggaaaccggcttcgtcgacctgctcaagccgcgctacgagaacatcgcgcagtcccaggcgttcttcggcaagttcgacaagatctgctacaacaccgacaagggctacttcgagttccacatcgactacgcgaagttcaccgacaaggccaagaactccaggcagaagtgggccatctgcagccacggcgacaagcgctacgtgtacgacaagacggcgaaccagaacaagggcgcggccaagggcatcaacgtgaacgacgagctgaagtccctcttcgcgcgctaccacatcaacgacaagcagccgaacctcgtcatggacatctgccagaacaacgacaaggagttccacaagagcctgatgtgcctgctcaagaccctgctcgccctccgctactccaacgcgagctccgacgaggacttcatcctcagccccgtcgcgaacgacgagggcgtgttcttcaactccgccctcgcggacgacacgcagccgcagaacgccgacgcgaacggcgcctaccacatcgccctcaagggcctgtggctgctcaacgagctcaagaactccgacgacctgaacaaggtgaagctcgccattgacaaccagacgtggctgaatttcgctcagaatagggggggcgggggctcaggcgggggcgggagcggcggcgggggctctgggggcggcggcagcggcgggggcggcagcgggggcggcgggtcgccgaagaagaagcgcaaggtgtccggcggcagctccggcggcagcccgaagaagaagcgcaaagtgtgagggacccgatcgttcaaacatttggcaataaagtttcttaagattgaatcctgttgccggtcttgcgatgattatcatataatttctgttgaattacgttaagcatgtaataattaacatgtaatgcatgacgttatttatgagatgggtttttatgattagagtcccgcaattatacatttaatacgcgatagaaaacaaaatatagcgcgcaaactaggataaattatcgcgcgcggtgtcatctatgttactagatcggtaccgaattcattatgtggtctaggtaggttctatatataagaaaacttgaaatgttctaaaaaaaaattcaagcccatgcatgattgaagcaaacggtatagcaacggtgttaacctgatctagtgatctcttgcaatccttaacggccacctaccgcaggtagcaaacggcgtccccctcctcgatatctccgcggcgacctctggctttttccgcggaattgcgcggtggggacggattccacgagaccgcgacgcaaccgcctctcgccgctgggccccacaccgctcggtgccgtagcctcacgggactctttctccctcctcccccgttataaattggcttcatcccctccttgcctcatccatccaaatcccagtccccaatcccatcccttcgtaggagaaattcatcgaagctaagcgaatcctcgcgatcctctcaaggtactgcgagttttcgatccccctctcgacccctcgtatgtttgtgtttgtcgtagcgtttgattaggtatgctttccctgtttgtgttcgtcgtagcgtttgattaggtatgctttccctgttcgtgttcatcgtagtgtttgattaggtcgtgtgaggcgatggcctgctcgcgtccttcgatctgtagtcgatttgcgggtcgtggtgtagatctgcgggctgtgatgaagttatttggtgtgatctgctcgcctgattctgcgggttggctcgagtagatatgatggttggaccggttggttcgtttaccgcgctagggttgggctgggatgatgttgcatgcgccgttgcgcgtgatcccgcagcaggacttgcgtttgattgccagatctcgttacgattatgtgatttggtttggactttttagatctgtagcttctgcttatgtgccagatgcgcctactgctcatatgcctgatgataatcataaatggctgtggaactaactagttgattgcggagtcatgtatcagctacaggtgtagggactagctacaggtgtagggacttgcgtctaattgtttggtcctttactcatgttgcaattatgcaatttagtttagattgtttgttccactcatctaggctgtaaaagggacactgcttagattgctgtttaatctttttagtagattatattatattggtaacttattacccctattacatgccatacgtgacttctgctcatgcctgatgataatcatagatcactgtggaattaattagttgattgttgaatcatgtttcatgtacataccacggcacaattgcttagttccttaacaaatgcaaattttactgatccatgtatgatttgcgtggttctctaatgtgaaatactatagctacttgttagtaagaatcaggttcgtatgcttaatgctgtatgtgccttctgctcatgcctgatgataatcatatatcactggaattaattagttgatcgtttaatcatatatcaagtacataccatgccacaatttttagtcacttaacccatgcagattgaactggtccctgcatgttttgctaaattgttctattctgattagaccatatatcatgtatttttttttggtaatggttctcttattttaaatgctatatagttctggtacttgttagaaagatctgcttcatagtttagttgcctatccctcgaattaggatgctgagcagctgatcctatagctttgtttcatgtatcaattcttttgtgttcaacagtcagtttttgttagattcattgtaacttatggtcgcttactcttctggtcctcaatgcttgcagaagcttgaaattctgatgagtccgtgaggacgaaacgagtaagctcgtcaatttctactgtttgtagatgggaaagaccgaggagaagatctaatttctactgtttgtagatgcaccaaggaaggggaggagatcaatttctactgtttgtagatgtcacagatcacaaacttcaaatgaatttctactgtttgtagatacgcccagaaagcatacgcagtcggccggcatggtcccagcctcctcgctggcgccggctgggcaacatgcttcggcatggcgaatgggacgatcgttcaaacatttggcaataaagtttcttaagattgaatcctgttgccggtcttgcgatgattatcatataatttctgttgaattacgttaagcatgtaataattaacatgtaatgcatgacgttatttatgagatgggtttttatgattagagtcccgcaattatacatttaatacgcgatagaaaacaaaatatagcgcgcaaactaggataaattatcgcgcgcggtgtcatctatgttactagatccctaggctgcagtgcagcgtgacccggtcgtgcccctctctagagataatgagcattgcatgtctaagttataaaaaattaccacatattttttttgtcacacttgtttgaagtgcagtttatctatctttatacatatatttaaactttactctacgaataatataatctatagtactacaataatatcagtgttttagagaatcatataaatgaacagttagacatggtctaaaggacaattgagtattttgacaacaggactctacagttttatctttttagtgtgcatgtgttctcctttttttttgcaaatagcttcacctatataatacttcatccattttattagtacatccatttagggtttagggttaatggtttttatagactaatttttttagtacatctattttattctattttagcctctaaattaagaaaactaaaactctattttagtttttttatttaataatttagatataaaatagaataaaataaagtgactaaaaattaaacaaataccctttaagaaattaaaaaaactaaggaaacatttttcttgtttcgagtagataatgccagcctgttaaacgccgtcgacgagtctaacggacaccaaccagcgaaccagcagcgtcgcgtcgggccaagcgaagcagacggcacggcatctctgtcgctgcctctggacccctctcgagagttccgctccaccgttggacttgctccgctgtcggcatccagaaattgcgtggcggagcggcagacgtgagccggcacggcaggcggcctcctcctcctctcacggcaccggcagctacgggggattcctttcccaccgctccttcgctttcccttcctcgcccgccgtaataaatagacaccccctccacaccctctttccccaacctcgtgttgttcggagcgcacacacacacaaccagatctcccccaaatccacccgtcggcacctccgcttcaaggtacgccgctcgtcctccccccccccccctctctaccttctctagatcggcgttccggtccatggttagggcccggtagttctacttctgttcatgtttgtgttagatccgtgtttgtgttagatccgtgctgctagcgttcgtacacggatgcgacctgtacgtcagacacgttctgattgctaacttgccagtgtttctctttggggaatcctgggatggctctagccgttccgcagacgggatcgatttcatgattttttttgtttcgttgcatagggtttggtttgcccttttcctttatttcaatatatgccgtgcacttgtttgtcgggtcatcttttcatgcttttttttgtcttggttgtgatgatgtggtctggttgggcggtcgttctagatcggagtagaattctgtttcaaactacctggtggatttattaattttggatctgtatgtgtgtgccatacatattcatagttacgaattgaagatgatggatggaaatatcgatctaggataggtatacatgttgatgcgggttttactgatgcatatacagagatgctttttgttcgcttggttgtgatgatgtggtgtggttgggcggtcgttcattcgttctagatcggagtagaatactgtttcaaactacctggtgtatttattaattttggaactgtatgtgtgtgtcatacatcttcatagttacgagtttaagatggatggaaatatcgatctaggataggtatacatgttgatgtgggttttactgatgcatatacatgatggcatatgcagcatctattcatatgctctaaccttgagtacctatctattataataaacaagtatgttttataattattttgatcttgatatacttggatgatggcatatgcagcagctatatgtggatttttttagccctgccttcatacgctatttatttgcttggtactgtttcttttgtcgatgctcaccctgttgtttggtgttacttctgcagggatcaccgatcatgcaaaaactcattaactcagtgcaaaactatgcctggggcagcaaaacggcgttgactgaactttatggtatggaaaatccgtccagccagccgatggccgagctgtggatgggcgcacatccgaaaagcagttcacgagtgcagaatgccgccggagatatcgtttcactgcgtgatgtgattgagagtgataaatcgactctgctcggagaggccgttgccaaacgctttggcgaactgcctttcctgttcaaagtattatgcgcagcacagccactctccattcaggttcatccaaacaaacacaattctgaaatcggttttgccaaagaaaatgccgcaggtatcccgatggatgccgccgagcgtaactataaagatcctaaccacaagccggagctggtttttgcgctgacgcctttccttgcgatgaacgcgtttcgtgaattttccgagattgtctccctactccagccggtcgcaggtgcacatccggcgattgctcactttttacaacagcctgatgccgaacgtttaagcgaactgttcgccagcctgttgaatatgcagggtgaagaaaaatcccgcgcgctggcgattttaaaatcggccctcgatagccagcagggtgaaccgtggcaaacgattcgtttaatttctgaattttacccggaagacagcggtctgttctccccgctattgctgaatgtggtgaaattgaaccctggcgaagcgatgttcctgttcgctgaaacaccgcacgcttacctgcaaggcgtggcgctggaagtgatggcaaactccgataacgtgctgcgtgcgggtctgacgcctaaatacattgatattccggaactggttgccaatgtgaaattcgaagccaaaccggctaaccagttgttgacccagccggtgaaacaaggtgcagaactggacttcccgattccagtggatgattttgccttctcgctgcatgaccttagtgataaagaaaccaccattagccagcagagtgccgccattttgttctgcgtcgaaggcgatgcaacgttgtggaaaggttctcagcagttacagcttaaaccgggtgaatcagcgtttattgccgccaacgaatcaccggtgactgtcaaaggccacggccgtttagcgcgtgtttacaacaagctgtaagagcttactgaaaaaattaacatctcttgctaagctgggagctcgatccgtcgacctgcagatcgttcaaacatttggcaataaagtttcttaagattgaatcctgttgccggtcttgcgatgattatcatataatttctgttgaattacgttaagcatgtaataattaacatgtaatgcatgacgttatttatgagatgggtttttatgattagagtcccgcaattatacatttaatacgcgatagaaaacaaaatatagcgcgcaaactaggataaattatcgcgcgcggtgtcatctatgttactagatccggaccgcctgcaggcccgggggcgcgccctaattagctaacggccaggatcgccgcgtgagcctttagcaactagctagattaattaacgcaatctgttattaagttgtctaagcgtcaatttgtttacaccacaatatatcctgccaccagccagccaacagctccccgaccggcagctcggcacaaaatcaccactcgatacaggcagcccatcagaattaattctcatgtttgacagcttatcatcgactgcacggtgcaccaatgcttctggcgtcaggcagccatcggaagctgtggtatggctgtgcaggtcgtaaatcactgcataattcgtgtcgctcaaggcgcactcccgttctggataatgttttttgcgccgacatcataacggttctggcaaatattctgaaatgagctgttgacaattaatcatccggctcgtataatgtgtggaattgtgagcggataacaatttcacacaggaaacagaccatgagggaagcgttgatcgccgaagtatcgactcaactatcagaggtagttggcgtcatcgagcgccatctcgaaccgacgttgctggccgtacatttgtacggctccgcagtggatggcggcctgaagccacacagtgatattgatttgctggttacggtgaccgtaaggcttgatgaaacaacgcggcgagctttgatcaacgaccttttggaaacttcggcttcccctggagagagcgagattctccgcgctgtagaagtcaccattgttgtgcacgacgacatcattccgtggcgttatccagctaagcgcgaactgcaatttggagaatggcagcgcaatgacattcttgcaggtatcttcgagccagccacgatcgacattgatctggctatcttgctgacaaaagcaagagaacatagcgttgccttggtaggtccagcggcggaggaactctttgatccggttcctgaacaggatctatttgaggcgctaaatgaaaccttaacgctatggaactcgccgcccgactgggctggcgatgagcgaaatgtagtgcttacgttgtcccgcatttggtacagcgcagtaaccggcaaaatcgcgccgaaggatgtcgctgccgactgggcaatggagcgcctgccggcccagtatcagcccgtcatacttgaagctaggcaggcttatcttggacaagaagatcgcttggcctcgcgcgcagatcagttggaagaatttgttcactacgtgaaaggcgagatcaccaaagtagtcggcaaataaagctctagtggatctccgtacccagggatctggctcgcggcggacgcacgacgccggggcgagaccataggcgatctcctaaatcaatagtagctgtaacctcgaagcgtttcacttgtaacaacgattgagaatttttgtcataaaattgaaatacttggttcgcatttttgtcatccgcggtcagccgcaattctgacgaactgcccatttagctggagatgattgtacatccttcacgtgaaaatttctcaagcgctgtgaacaagggttcagattttagattgaaaggtgagccgttgaaacacgttcttcttgtcgatgacgacgtcgctatgcggcatcttattattgaataccttacgatccacgccttcaaagtgaccgcggtagccgacagcacccagttcacaagagtactctcttccgcgacggtcgatgtcgtggttgttgatctagatttaggtcgtgaagatgggctcgagatcgttcgtaatctggcggcaaagtctgatattccaatcataattatcagtggcgaccgccttgaggagacggataaagttgttgcactcgagctaggagcaagtgattttatcgctaagccgttcagtatcagagagtttctagcacgcattcgggttgccttgcgcgtgcgccccaacgttgtccgctccaaagaccgacggtctttttgttttactgactggacacttaatctcaggcaacgtcgcttgatgtccgaagctggcggtgaggtgaaacttacggcaggtgagttcaatcttctcctcgcgtttttagagaaaccccgcgacgttctatcgcgcgagcaacttctcattgccagtcgagtacgcgacgaggaggtttatgacaggagtatagatgttctcattttgaggctgcgccgcaaacttgaggcagatccgtcaagccctcaactgataaaaacagcaagaggtgccggttatttctttgacgcggacgtgcaggtttcgcacggggggacgatggcagcctgagccaattcccagatccccgaggaatcggcgtgagcggtcgcaaaccatccggcccggtacaaatcggcgcggcgctgggtgatgacctggtggagaagttgaaggccgcgcaggccgcccagcggcaacgcatcgaggcagaagcacgccccggtgaatcgtggcaagcggccgctgatcgaatccgcaaagaatcccggcaaccgccggcagccggtgcgccgtcgattaggaagccgcccaagggcgacgagcaaccagattttttcgttccgatgctctatgacgtgggcacccgcgatagtcgcagcatcatggacgtggccgttttccgtctgtcgaagcgtgaccgacgagctggcgaggtgatccgctacgagcttccagacgggcacgtagaggtttccgcagggccggccggcatggccagtgtgtgggattacgacctggtactgatggcggtttcccatctaaccgaatccatgaaccgataccgggaagggaagggagacaagcccggccgcgtgttccgtccacacgttgcggacgtactcaagttctgccggcgagccgatggcggaaagcagaaagacgacctggtagaaacctgcattcggttaaacaccacgcacgttgccatgcagcgtacgaagaaggccaagaacggccgcctggtgacggtatccgagggtgaagccttgattagccgctacaagatcgtaaagagcgaaaccgggcggccggagtacatcgagatcgagctggctgattggatgtaccgcgagatcacagaaggcaagaacccggacgtgctgacggttcaccccgattactttttgatcgatcccggcatcggccgttttctctaccgcctggcacgccgcgccgcaggcaaggcagaagccagatggttgttcaagacgatctacgaacgcagtggcagcgccggagagttcaagaagttctgtttcaccgtgcgcaagctgatcgggtcaaatgacctgccggagtacgatttgaaggaggaggcggggcaggctggcccgatcctagtcatgcgctaccgcaacctgatcgagggcgaagcatccgccggttcctaatgtacggagcagatgctagggcaaattgccctagcaggggaaaaaggtcgaaaaggtctctttcctgtggatagcacgtacattgggaacccaaagccgtacattgggaaccggaacccgtacattgggaacccaaagccgtacattgggaaccggtcacacatgtaagtgactgatataaaagagaaaaaaggcgatttttccgcctaaaactctttaaaacttattaaaactcttaaaacccgcctggcctgtgcataactgtctggccagcgcacagccgaagagctgcaaaaagcgcctacccttcggtcgctgcgctccctacgccccgccgcttcgcgtcggcctatcgcggccgctggccgctcaaaaatggctggcctacggccaggcaatctaccagggcgcggacaagccgcgccgtcgccactcgaccgccggcgctgaggtctgcctcgtgaagaaggtgttgctgactcataccaggcctgaatcgccccatcatccagccagaaagtgagggagccacggttgatgagagctttgttgtaggtggaccagttggtgattttgaacttttgctttgccacggaacggtctgcgttgtcgggaagatgcgtgatctgatccttcaactcagcaaaagttcgatttattcaacaaagccgccgtcccgtcaagtcagcgtaatgctctgccagtgttacaaccaattaaccaattctgattagaaaaactcatcgagcatcaaatgaaactgcaatttattcatatcaggattatcaataccatatttttgaaaaagccgtttctgtaatgaaggagaaaactcaccgaggcagttccataggatggcaagatcctggtatcggtctgcgattccgactcgtccaacatcaatacaacctattaatttcccctcgtcaaaaataaggttatcaagtgagaaatcaccatgagtgacgactgaatccggtgagaatggcaaaagctctgcattaatgaatcggccaacgcgcggggagaggcggtttgcgtattgggcgctcttccgcttcctcgctcactgactcgctgcgctcggtcgttcggctgcggcgagcggtatcagctcactcaaaggcggtaatacggttatccacagaatcaggggataacgcaggaaagaacatgtgagcaaaaggccagcaaaaggccaggaaccgtaaaaaggccgcgttgctggcgtttttccataggctccgcccccctgacgagcatcacaaaaatcgacgctcaagtcagaggtggcgaaacccgacaggactataaagataccaggcgtttccccctggaagctccctcgtgcgctctcctgttccgaccctgccgcttaccggatacctgtccgcctttctcccttcgggaagcgtggcgctttctcatagctcacgctgtaggtatctcagttcggtgtaggtcgttcgctccaagctgggctgtgtgcacgaaccccccgttcagcccgaccgctgcgccttatccggtaactatcgtcttgagtccaacccggtaagacacgacttatcgccactggcagcagccactggtaacaggattagcagagcgaggtatgtaggcggtgctacagagttcttgaagtggtggcctaactacggctacactagaagaacagtatttggtatctgcgctctgctgaagccagttaccttcggaaaaagagttggtagctcttgatccggcaaacaaaccaccgctggtagcggtggtttttttgtttgcaagcagcagattacgcgcagaaaaaaaggatctcaagaagatcctttgatcttttctacggggtctgacgctcagtggaacgaaaactcacgttaagggattttggtcatgagattatcaaaaaggatcttcacctagatccttttgatccggaatta

SEQ ID NO: 39 - DNA, 17534 bp, synthetic construct
  source 1..17534: mol_type = other DNA
attcctgtggttggcatgcacatacaaatggacgaacggataaaccttttcacgcccttttaaatatccgattattctaataaacgctcttttctcttaggtttacccgccaatatatcctgtcaaacactgatagtttaaactggcactagcctaacggtgttgactaactaggccgcttccctaattagctaacccgggggcgcgccgggaccggaattcattatgtggtctaggtaggttctatatataagaaaacttgaaatgttctaaaaaaaaattcaagcccatgcatgattgaagcaaacggtatagcaacggtgttaacctgatctagtgatctcttgcaatccttaacggccacctaccgcaggtagcaaacggcgtccccctcctcgatatctccgcggcgacctctggctttttccgcggaattgcgcggtggggacggattccacgagaccgcgacgcaaccgcctctcgccgctgggccccacaccgctcggtgccgtagcctcacgggactctttctccctcctcccccgttataaattggcttcatcccctccttgcctcatccatccaaatcccagtccccaatcccatcccttcgtaggagaaattcatcgaagctaagcgaatcctcgcgatcctctcaaggtactgcgagttttcgatccccctctcgacccctcgtatgtttgtgtttgtcgtagcgtttgattaggtatgctttccctgtttgtgttcgtcgtagcgtttgattaggtatgctttccctgttcgtgttcatcgtagtgtttgattaggtcgtgtgaggcgatggcctgctcgcgtccttcgatctgtagtcgatttgcgggtcgtggtgtagatctgcgggctgtgatgaagttatttggtgtgatctgctcgcctgattctgcgggttggctcgagtagatatgatggttggaccggttggttcgtttaccgcgctagggttgggctgggatgatgttgcatgcgccgttgcgcgtgatcccgcagcaggacttgcgtttgattgccagatctcgttacgattatgtgatttggtttggactttttagatctgtagcttctgcttatgtgccagatgcgcctactgctcatatgcctgatgataatcataaatggctgtggaactaactagttgattgcggagtcatgtatcagctacaggtgtagggactagctacaggtgtagggacttgcgtctaattgtttggtcctttactcatgttgcaattatgcaatttagtttagattgtttgttccactcatctaggctgtaaaagggacactgcttagattgctgtttaatctttttagtagattatattatattggtaacttattacccctattacatgccatacgtgacttctgctcatgcctgatgataatcatagatcactgtggaattaattagttgattgttgaatcatgtttcatgtacataccacggcacaattgcttagttccttaacaaatgcaaattttactgatccatgtatgatttgcgtggttctctaatgtgaaatactatagctacttgttagtaagaatcaggttcgtatgcttaatgctgtatgtgccttctgctcatgcctgatgataatcatatatcactggaattaattagttgatcgtttaatcatatatcaagtacataccatgccacaatttttagtcacttaacccatgcagattgaactggtccctgcatgttttgctaaattgttctattctgattagaccatatatcatgtatttttttttggtaatggttctcttattttaaatgctatatagttctggtacttgttagaaagatctgcttcatagtttagttgcctatccctcgaattaggatgctgagcagctgatcctatagctttgtttcatgtatcaattcttttgtgttcaacagtcagtttttgttagattcattgtaacttatggtcgcttactcttctggtcctcaatgcttgcagggatcccctaaatagaccatgccgaagaagaagcgcaaggtcgggggcgggggctcaggcgggggcgggagcggcggcgggggctctgggggcggcggcagcggcgggggcggcagcgggggcggcgggtcgatgctgttccaggatttcactcatctgtaccctctctcaaagactgttcggttcgagctcaagcctattgggcggactctggagcacatccacgcgaagaacttcctcagccaggacgaaaccatggccgacatgtaccagaaggtcaaggtcatcctcgacgactaccacagggacttcatcgcggacatgatgggcgaggtgaagctgacgaagctcgccgagttctacgacgtctacctcaagttccgcaagaacccgaaggacgacggcctccagaagcagctcaaggacctgcaggccgtcctgaggaaggagtccgtcaagcccatcggcagcggcggcaagtacaagaccggctacgacaggctgttcggcgccaagctgttcaaggacggcaaggagctcggcgacctggcgaagttcgtgatcgcgcaggagggcgagagctcccccaagctggcccacctggcccacttcgagaagttcagcacgtacttcaccggcttccacgacaacaggaagaacatgtacagcgacgaggacaagcacacggccatcgcctaccgcctcatccacgagaacctgccccgcttcatcgacaacctgcagatcctgacgaccatcaagcagaagcactccgccctgtacgaccagatcatcaacgagctcaccgcgagcggcctcgacgtgtccctcgccagccacctcgacggctaccacaagctcctgacccaggagggcatcaccgcctacaaccgcatcatcggcgaggtgaacggctacaccaacaagcacaaccagatctgccacaagtccgagaggatcgccaagctcaggcccctgcacaagcagatcctcagcgacggcatgggcgtgagcttcctcccgtccaagttcgccgacgactccgagatgtgccaggccgtgaacgagttctacaggcactacaccgacgtgttcgccaaggtgcagtccctgttcgacggcttcgacgaccaccagaaggacggcatctacgtggagcacaagaacctgaacgagctgtccaagcaggccttcggcgacttcgccctcctgggccgcgtgctggacggctactacgtggacgtcgtgaacccggagttcaacgagcgcttcgcgaaggcgaagacggacaacgcgaaggccaagctcaccaaggagaaggacaagttcatcaagggcgtccacagcctcgcgtccctggagcaggcgatcgagcaccacaccgcgcgccacgacgacgagtccgtgcaggccggcaagctcggccagtacttcaagcacggcctggccggcgtcgacaacccgatccagaagatccacaacaaccactccaccatcaagggcttcctggagagggagcgcccggcgggcgagcgcgcgctccccaagatcaagtccggcaagaaccccgagatgacgcagctcaggcagctgaaggagctgctcgacaacgcgctcaacgtggcgcacttcgccaagctgctcacgaccaagaccacgctggacaaccaggacggcaacttctacggcgagttcggcgtcctgtacgacgagctggcgaagatcccgaccctgtacaacaaggtccgcgactacctgagccagaagcccttctccaccgagaagtacaagctcaacttcggcaacccgaccctcctgaacggctgggacctcaacaaggagaaggacaacttcggcgtgatcctccagaaggacggctgctactacctcgccctgctggacaaggcgcacaagaaggtcttcgacaacgccccgaacaccggcaagaacgtgtaccagaagatggtgtacaagctgctccccggccccaacaagatgctgccgaaggtgttcttcgcgaagtccaacctcgactactacaaccccagcgccgagctcctggacaagtacgccaagggcacgcacaagaagggcgacaacttcaacctcaaggactgccacgcgctgatcgacttcttcaaggcgggcatcaacaagcaccccgagtggcagcacttcggcttcaagttcagcccgacctccagctacagggacctcagcgacttctaccgcgaggtggagccccagggctaccaggtgaagttcgtcgacatcaacgccgactacatcgacgagctcgtcgagcagggcaagctctacctgttccagatctacaacaaggacttctccccgaaggcccacggcaagccgaacctccacacgctctacttcaaggccctcttcagcgaggacaacctggccgacccgatctacaagctcaacggcgaggcgcagatcttctaccgcaaggccagcctggacatgaacgaaacgaccatccacagggccggcgaggtcctggagaacaagaacccggacaacccgaagaagaccacgaccctgtcctacgacatcatcaaggacaagaggtacacccaggacaagttcatgctccacgtcccgatcaccatgaacttcggcgtccagggcatgaccatcaaggagttcaacaagaaggtcaaccagagcatccagcagtacgacgaggtgaacgtcatcggcatcgaccgcggcgagaggcacctgctctacctgacggtcatcaactccaagggcgagatcctcgagcagcgcagcctgaacgacatcacgaccgcgagcgccaacggcacgcaggtcaccacgccgtaccacaagatcctcgacaagcgcgagatcgagaggctgaacgcgcgcgtcggctggggcgagatcgaaacgatcaaggagctcaagtccggctacctcagccacgtcgtgcaccagatcaaccagctcatgctgaagtacaacgcgatcgtggtcctcgaggacctgaacttcggcttcaagaggggccgcttcaaggtggagaagcagatctaccagaacttcgagaacgccctgatcaagaagctcaaccacctggtcctcaaggacaaggcggacgacgagatcggcagctacaagaacgcgctccagctgaccaacaacttcacggacctcaagtccatcggcaagcagacgggcttcctgttctacgtgccggcgtggaacacctccaagatcgacccggaaaccggcttcgtcgacctgctcaagccgcgctacgagaacatcgcgcagtcccaggcgttcttcggcaagttcgacaagatctgctacaacaccgacaagggctacttcgagttccacatcgactacgcgaagttcaccgacaaggccaagaactccaggcagaagtgggccatctgcagccacggcgacaagcgctacgtgtacgacaagacggcgaaccagaacaagggcgcggccaagggcatcaacgtgaacgacgagctgaagtccctcttcgcgcgctaccacatcaacgacaagcagccgaacctcgtcatggacatctgccagaacaacgacaaggagttccacaagagcctgatgtgcctgctcaagaccctgctcgccctccgctactccaacgcgagctccgacgaggacttcatcctcagccccgtcgcgaacgacgagggcgtgttcttcaactccgccctcgcggacgacacgcagccgcagaacgccgacgcgaacggcgcctaccacatcgccctcaagggcctgtggctgctcaacgagctcaagaactccgacgacctgaacaaggtgaagctcgccattgacaaccagacgtggctgaatttcgctcagaatagggggggcgggggctcaggcgggggcgggagcggcggcgggggctctgggggcggcggcagcggcgggggcggcagcgggggcggcgggtcgccgaagaagaagcgcaaggtgtccggcggcagctccggcggcagcccgaagaagaagcgcaaagtgtgagggacccgatcgttcaaacatttggcaataaagtttcttaagattgaatcctgttgccggtcttgcgatgattatcatataatttctgttgaattacgttaagcatgtaataattaacatgtaatgcatgacgttatttatgagatgggtttttatgattagagtcccgcaattatacatttaatacgcgatagaaaacaaaatatagcgcgcaaactaggataaattatcgcgcgcggtgtcatctatgttactagatcggtaccgaattcattatgtggtctaggtaggttctatatataagaaaacttgaaatgttctaaaaaaaaattcaagcccatgcatgattgaagcaaacggtatagcaacggtgttaacctgatctagtgatctcttgcaatccttaacggccacctaccgcaggtagcaaacggcgtccccctcctcgatatctccgcggcgacctctggctttttccgcggaattgcgcggtggggacggattccacgagaccgcgacgcaaccgcctctcgccgctgggccccacaccgctcggtgccgtagcctcacgggactctttctccctcctcccccgttataaattggcttcatcccctccttgcctcatccatccaaatcccagtccccaatcccatcccttcgtaggagaaattcatcgaagctaagcgaatcctcgcgatcctctcaaggtactgcgagttttcgatccccctctcgacccctcgtatgtttgtgtttgtcgtagcgtttgattaggtatgctttccctgtttgtgttcgtcgtagcgtttgattaggtatgctttccctgttcgtgttcatcgtagtgtttgattaggtcgtgtgaggcgatggcctgctcgcgtccttcgatctgtagtcgatttgcgggtcgtggtgtagatctgcgggctgtgatgaagttatttggtgtgatctgctcgcctgattctgcgggttggctcgagtagatatgatggttggaccggttggttcgtttaccgcgctagggttgggctgggatgatgttgcatgcgccgttgcgcgtgatcccgcagcaggacttgcgtttgattgccagatctcgttacgattatgtgatttggtttggactttttagatctgtagcttctgcttatgtgccagatgcgcctactgctcatatgcctgatgataatcataaatggctgtggaactaactagttgattgcggagtcatgtatcagctacaggtgtagggactagctacaggtgtagggacttgcgtctaattgtttggtcctttactcatgttgcaattatgcaatttagtttagattgtttgttccactcatctaggctgtaaaagggacactgcttagattgctgtttaatctttttagtagattatattatattggtaacttattacccctattacatgccatacgtgacttctgctcatgcctgatgataatcatagatcactgtggaattaattagttgattgttgaatcatgtttcatgtacataccacggcacaattgcttagttccttaacaaatgcaaattttactgatccatgtatgatttgcgtggttctctaatgtgaaatactatagctacttgttagtaagaatcaggttcgtatgcttaatgctgtatgtgccttctgctcatgcctgatgataatcatatatcactggaattaattagttgatcgtttaatcatatatcaagtacataccatgccacaatttttagtcacttaacccatgcagattgaactggtccctgcatgttttgctaaattgttctattctgattagaccatatatcatgtatttttttttggtaatggttctcttattttaaatgctatatagttctggtacttgttagaaagatctgcttcatagtttagttgcctatccctcgaattaggatgctgagcagctgatcctatagctttgtttcatgtatcaattcttttgtgttcaacagtcagtttttgttagattcattgtaacttatggtcgcttactcttctggtcctcaatgcttgcagaagcttgaaattctgatgagtccgtgaggacgaaacgagtaagctcgtcaatttctactgtttgtagatgggaaagaccgaggagaagatctaatttctactgtttgtagatgcaccaaggaaggggaggagatcaatttctactgtttgtagatgtcacagatcacaaacttcaaatgaatttctactgtttgtagatacgcccagaaagcatacgcagtcggccggcatggtcccagcctcctcgctggcgccggctgggcaacatgcttcggcatggcgaatgggacgatcgttcaaacatttggcaataaagtttcttaagattgaatcctgttgccggtcttgcgatgattatcatataatttctgttgaattacgttaagcatgtaataattaacatgtaatgcatgacgttatttatgagatgggtttttatgattagagtcccgcaattatacatttaatacgcgatagaaaacaaaatatagcgcgcaaactaggataaattatcgcgcgcggtgtcatctatgttactagatccctaggctgcagtgcagcgtgacccggtcgtgcccctctctagagataatgagcattgcatgtctaagttataaaaaattaccacatattttttttgtcacacttgtttgaagtgcagtttatctatctttatacatatatttaaactttactctacgaataatataatctatagtactacaataatatcagtgttttagagaatcatataaatgaacagttagacatggtctaaaggacaattgagtattttgacaacaggactctacagttttatctttttagtgtgcatgtgttctcctttttttttgcaaatagcttcacctatataatacttcatccattttattagtacatccatttagggtttagggttaatggtttttatagactaatttttttagtacatctattttattctattttagcctctaaattaagaaaactaaaactctattttagtttttttatttaataatttagatataaaatagaataaaataaagtgactaaaaattaaacaaataccctttaagaaattaaaaaaactaaggaaacatttttcttgtttcgagtagataatgccagcctgttaaacgccgtcgacgagtctaacggacaccaaccagcgaaccagcagcgtcgcgtcgggccaagcgaagcagacggcacggcatctctgtcgctgcctctggacccctctcgagagttccgctccaccgttggacttgctccgctgtcggcatccagaaattgcgtggcggagcggcagacgtgagccggcacggcaggcggcctcctcctcctctcacggcaccggcagctacgggggattcctttcccaccgctccttcgctttcccttcctcgcccgccgtaataaatagacaccccctccacaccctctttccccaacctcgtgttgttcggagcgcacacacacacaaccagatctcccccaaatccacccgtcggcacctccgcttcaaggtacgccgctcgtcctccccccccccccctctctaccttctctagatcggcgttccggtccatggttagggcccggtagttctacttctgttcatgtttgtgttagatccgtgtttgtgttagatccgtgctgctagcgttcgtacacggatgcgacctgtacgtcagacacgttctgattgctaacttgccagtgtttctctttggggaatcctgggatggctctagccgttccgcagacgggatcgatttcatgattttttttgtttcgttgcatagggtttggtttgcccttttcctttatttcaatatatgccgtgcacttgtttgtcgggtcatcttttcatgcttttttttgtcttggttgtgatgatgtggtctggttgggcggtcgttctagatcggagtagaattctgtttcaaactacctggtggatttattaattttggatctgtatgtgtgtgccatacatattcatagttacgaattgaagatgatggatggaaatatcgatctaggataggtatacatgttgatgcgggttttactgatgcatatacagagatgctttttgttcgcttggttgtgatgatgtggtgtggttgggcggtcgttcattcgttctagatcggagtagaatactgtttcaaactacctggtgtatttattaattttggaactgtatgtgtgtgtcatacatcttcatagttacgagtttaagatggatggaaatatcgatctaggataggtatacatgttgatgtgggttttactgatgcatatacatgatggcatatgcagcatctattcatatgctctaaccttgagtacctatctattataataaacaagtatgttttataattattttgatcttgatatacttggatgatggcatatgcagcagctatatgtggatttttttagccctgccttcatacgctatttatttgcttggtactgtttcttttgtcgatgctcaccctgttgtttggtgttacttctgcagggatcaccgatcatgcaaaaactcattaactcagtgcaaaactatgcctggggcagcaaaacggcgttgactgaactttatggtatggaaaatccgtccagccagccgatggccgagctgtggatgggcgcacatccgaaaagcagttcacgagtgcagaatgccgccggagatatcgtttcactgcgtgatgtgattgagagtgataaatcgactctgctcggagaggccgttgccaaacgctttggcgaactgcctttcctgttcaaagtattatgcgcagcacagccactctccattcaggttcatccaaacaaacacaattctgaaatcggttttgccaaagaaaatgccgcaggtatcccgatggatgccgccgagcgtaactataaagatcctaaccacaagccggagctggtttttgcgctgacgcctttccttgcgatgaacgcgtttcgtgaattttccgagattgtctccctactccagccggtcgcaggtgcacatccggcgattgctcactttttacaacagcctgatgccgaacgtttaagcgaactgttcgccagcctgttgaatatgcagggtgaagaaaaatcccgcgcgctggcgattttaaaatcggccctcgatagccagcagggtgaaccgtggcaaacgattcgtttaatttctgaattttacccggaagacagcggtctgttctccccgctattgctgaatgtggtgaaattgaaccctggcgaagcgatgttcctgttcgctgaaacaccgcacgcttacctgcaaggcgtggcgctggaagtgatggcaaactccgataacgtgctgcgtgcgggtctgacgcctaaatacattgatattccggaactggttgccaatgtgaaattcgaagccaaaccggctaaccagttgttgacccagccggtgaaacaaggtgcagaactggacttcccgattccagtggatgattttgccttctcgctgcatgaccttagtgataaagaaaccaccattagccagcagagtgccgccattttgttctgcgtcgaaggcgatgcaacgttgtggaaaggttctcagcagttacagcttaaaccgggtgaatcagcgtttattgccgccaacgaatcaccggtgactgtcaaaggccacggccgtttagcgcgtgtttacaacaagctgtaagagcttactgaaaaaattaacatctcttgctaagctgggagctcgatccgtcgacctgcagatcgttcaaacatttggcaataaagtttcttaagattgaatcctgttgccggtcttgcgatgattatcatataatttctgttgaattacgttaagcatgtaataattaacatgtaatgcatgacgttatttatgagatgggtttttatgattagagtcccgcaattatacatttaatacgcgatagaaaacaaaatatagcgcgcaaactaggataaattatcgcgcgcggtgtcatctatgttactagatccggaccgcctgcaggcccgggggcgcgccctaattagctaacggccaggatcgccgcgtgagcctttagcaactagctagattaattaacgcaatctgttattaagttgtctaagcgtcaatttgtttacaccacaatatatcctgccaccagccagccaacagctccccgaccggcagctcggcacaaaatcaccactcgatacaggcagcccatcagaattaattctcatgtttgacagcttatcatcgactgcacggtgcaccaatgcttctggcgtcaggcagccatcggaagctgtggtatggctgtgcaggtcgtaaatcactgcataattcgtgtcgctcaaggcgcactcccgttctggataatgttttttgcgccgacatcataacggttctggcaaatattctgaaatgagctgttgacaattaatcatccggctcgtataatgtgtggaattgtgagcggataacaatttcacacaggaaacagaccatgagggaagcgttgatcgccgaagtatcgactcaactatcagaggtagttggcgtcatcgagcgccatctcgaaccgacgttgctggccgtacatttgtacggctccgcagtggatggcggcctgaagccacacagtgatattgatttgctggttacggtgaccgtaaggcttgatgaaacaacgcggcgagctttgatcaacgaccttttggaaacttcggcttcccctggagagagcgagattctccgcgctgtagaagtcaccattgttgtgcacgacgacatcattccgtggcgttatccagctaagcgcgaactgcaatttggagaatggcagcgcaatgacattcttgcaggtatcttcgagccagccacgatcgacattgatctggctatcttgctgacaaaagcaagagaacatagcgttgccttggtaggtccagcggcggaggaactctttgatccggttcctgaacaggatctatttgaggcgctaaatgaaaccttaacgctatggaactcgccgcccgactgggctggcgatgagcgaaatgtagtgcttacgttgtcccgcatttggtacagcgcagtaaccggcaaaatcgcgccgaaggatgtcgctgccgactgggcaatggagcgcctgccggcccagtatcagcccgtcatacttgaagctaggcaggcttatcttggacaagaagatcgcttggcctcgcgcgcagatcagttggaagaatttgttcactacgtgaaaggcgagatcaccaaagtagtcggcaaataaagctctagtggatctccgtacccagggatctggctcgcggcggacgcacgacgccggggcgagaccataggcgatctcctaaatcaatagtagctgtaacctcgaagcgtttcacttgtaacaacgattgagaatttttgtcataaaattgaaatacttggttcgcatttttgtcatccgcggtcagccgcaattctgacgaactgcccatttagctggagatgattgtacatccttcacgtgaaaatttctcaagcgctgtgaacaagggttcagattttagattgaaaggtgagccgttgaaacacgttcttcttgtcgatgacgacgtcgctatgcggcatcttattattgaataccttacgatccacgccttcaaagtgaccgcggtagccgacagcacccagttcacaagagtactctcttccgcgacggtcgatgtcgtggttgttgatctagatttaggtcgtgaagatgggctcgagatcgttcgtaatctggcggcaaagtctgatattccaatcataattatcagtggcgaccgccttgaggagacggataaagttgttgcactcgagctaggagcaagtgattttatcgctaagccgttcagtatcagagagtttctagcacgcattcgggttgccttgcgcgtgcgccccaacgttgtccgctccaaagaccgacggtctttttgttttactgactggacacttaatctcaggcaacgtcgcttgatgtccgaagctggcggtgaggtgaaacttacggcaggtgagttcaatcttctcctcgcgtttttagagaaaccccgcgacgttctatcgcgcgagcaacttctcattgccagtcgagtacgcgacgaggaggtttatgacaggagtatagatgttctcattttgaggctgcgccgcaaacttgaggcagatccgtcaagccctcaactgataaaaacagcaagaggtgccggttatttctttgacgcggacgtgcaggtttcgcacggggggacgatggcagcctgagccaattcccagatccccgaggaatcggcgtgagcggtcgcaaaccatccggcccggtacaaatcggcgcggcgctgggtgatgacctggtggagaagttgaaggccgcgcaggccgcccagcggcaacgcatcgaggcagaagcacgccccggtgaatcgtggcaagcggccgctgatcgaatccgcaaagaatcccggcaaccgccggcagccggtgcgccgtcgattaggaagccgcccaagggcgacgagcaaccagattttttcgttccgatgctctatgacgtgggcacccgcgatagtcgcagcatcatggacgtggccgttttccgtctgtcgaagcgtgaccgacgagctggcgaggtgatccgctacgagcttccagacgggcacgtagaggtttccgcagggccggccggcatggccagtgtgtgggattacgacctggtactgatggcggtttcccatctaaccgaatccatgaaccgataccgggaagggaagggagacaagcccggccgcgtgttccgtccacacgttgcggacgtactcaagttctgccggcgagccgatggcggaaagcagaaagacgacctggtagaaacctgcattcggttaaacaccacgcacgttgccatgcagcgtacgaagaaggccaagaacggccgcctggtgacggtatccgagggtgaagccttgattagccgctacaagatcgtaaagagcgaaaccgggcggccggagtacatcgagatcgagctggctgattggatgtaccgcgagatcacagaaggcaagaacccggacgtgctgacggttcaccccgattactttttgatcgatcccggcatcggccgttttctctaccgcctggcacgccgcgccgcaggcaaggcagaagccagatggttgttcaagacgatctacgaacgcagtggcagcgccggagagttcaagaagttctgtttcaccgtgcgcaagctgatcgggtcaaatgacctgccggagtacgatttgaaggaggaggcggggcaggctggcccgatcctagtcatgcgctaccgcaacctgatcgagggcgaagcatccgccggttcctaatgtacggagcagatgctagggcaaattgccctagcaggggaaaaaggtcgaaaaggtctctttcctgtggatagcacgtacattgggaacccaaagccgtacattgggaaccggaacccgtacattgggaacccaaagccgtacattgggaaccggtcacacatgtaagtgactgatataaaagagaaaaaaggcgatttttccgcctaaaactctttaaaacttattaaaactcttaaaacccgcctggcctgtgcataactgtctggccagcgcacagccgaagagctgcaaaaagcgcctacccttcggtcgctgcgctccctacgccccgccgcttcgcgtcggcctatcgcggccgctggccgctcaaaaatggctggcctacggccaggcaatctaccagggcgcggacaagccgcgccgtcgccactcgaccgccggcgctgaggtctgcctcgtgaagaaggtgttgctgactcataccaggcctgaatcgccccatcatccagccagaaagtgagggagccacggttgatgagagctttgttgtaggtggaccagttggtgattttgaacttttgctttgccacggaacggtctgcgttgtcgggaagatgcgtgatctgatccttcaactcagcaaaagttcgatttattcaacaaagccgccgtcccgtcaagtcagcgtaatgctctgccagtgttacaaccaattaaccaattctgattagaaaaactcatcgagcatcaaatgaaactgcaatttattcatatcaggattatcaataccatatttttgaaaaagccgtttctgtaatgaaggagaaaactcaccgaggcagttccataggatggcaagatcctggtatcggtctgcgattccgactcgtccaacatcaatacaacctattaatttcccctcgtcaaaaataaggttatcaagtgagaaatcaccatgagtgacgactgaatccggtgagaatggcaaaagctctgcattaatgaatcggccaacgcgcggggagaggcggtttgcgtattgggcgctcttccgcttcctcgctcactgactcgctgcgctcggtcgttcggctgcggcgagcggtatcagctcactcaaaggcggtaatacggttatccacagaatcaggggataacgcaggaaagaacatgtgagcaaaaggccagcaaaaggccaggaaccgtaaaaaggccgcgttgctggcgtttttccataggctccgcccccctgacgagcatcacaaaaatcgacgctcaagtcagaggtggcgaaacccgacaggactataaagataccaggcgtttccccctggaagctccctcgtgcgctctcctgttccgaccctgccgcttaccggatacctgtccgcctttctcccttcgggaagcgtggcgctttctcatagctcacgctgtaggtatctcagttcggtgtaggtcgttcgctccaagctgggctgtgtgcacgaaccccccgttcagcccgaccgctgcgccttatccggtaactatcgtcttgagtccaacccggtaagacacgacttatcgccactggcagcagccactggtaacaggattagcagagcgaggtatgtaggcggtgctacagagttcttgaagtggtggcctaactacggctacactagaagaacagtatttggtatctgcgctctgctgaagccagttaccttcggaaaaagagttggtagctcttgatccggcaaacaaaccaccgctggtagcggtggtttttttgtttgcaagcagcagattacgcgcagaaaaaaaggatctcaagaagatcctttgatcttttctacggggtctgacgctcagtggaacgaaaactcacgttaagggattttggtcatgagattatcaaaaaggatcttcacctagatccttttgatccggaatta

SEQ ID NO: 40 - protein, 15 aa, unidentified
  source 1..15: note = Lachnospiraceae bacterium ND2006
YHSLLDKKEKERFEA

SEQ ID NO: 41 - protein, 18 aa, Acidaminococcus sp.
  source 1..18: note = subsp. BV3L6
YQKKLDNREKERVAARQA

SEQ ID NO: 42 - protein, 15 aa, Francisella sp.
  source 1..15: note = subsp. novicida U112
YHDKLAAIEKDRDSA

SEQ ID NO: 43 - protein, 12 aa, Moraxella bovoculi
YHKILDKREIER

SEQ ID NO: 44 - protein, 14 aa, unidentified
  source 1..14: note = Lachnospiraceae bacterium ND2006
EIINNFNGIRIKTD

SEQ ID NO: 45 - protein, 6 aa, Acidaminococcus sp.
  source 1..6: note = subsp. BV3L6
TIQQFD

SEQ ID NO: 46 - protein, 10 aa, Francisella sp.
  source 1..10: note = subsp. novicida U112
IIGNDRMKTN

SEQ ID NO: 47 - protein, 15 aa, Moraxella bovoculi
DITTASANGTQMTTP

SEQ ID NO: 48 - protein, 15 aa, Moraxella bovoculi
DITTASANGTQVTTP

SEQ ID NO: 49 - DNA, 17531 bp, synthetic construct
  source 1..17531: mol_type = other DNA
attcctgtggttggcatgcacatacaaatggacgaacggataaaccttttcacgcccttttaaatatccgattattctaataaacgctcttttctcttaggtttacccgccaatatatcctgtcaaacactgatagtttaaactggcactagcctaacggtgttgactaactaggccgcttccctaattagctaacccgggggcgcgccgggaccggaattcattatgtggtctaggtaggttctatatataagaaaacttgaaatgttctaaaaaaaaattcaagcccatgcatgattgaagcaaacggtatagcaacggtgttaacctgatctagtgatctcttgcaatccttaacggccacctaccgcaggtagcaaacggcgtccccctcctcgatatctccgcggcgacctctggctttttccgcggaattgcgcggtggggacggattccacgagaccgcgacgcaaccgcctctcgccgctgggccccacaccgctcggtgccgtagcctcacgggactctttctccctcctcccccgttataaattggcttcatcccctccttgcctcatccatccaaatcccagtccccaatcccatcccttcgtaggagaaattcatcgaagctaagcgaatcctcgcgatcctctcaaggtactgcgagttttcgatccccctctcgacccctcgtatgtttgtgtttgtcgtagcgtttgattaggtatgctttccctgtttgtgttcgtcgtagcgtttgattaggtatgctttccctgttcgtgttcatcgtagtgtttgattaggtcgtgtgaggcgatggcctgctcgcgtccttcgatctgtagtcgatttgcgggtcgtggtgtagatctgcgggctgtgatgaagttatttggtgtgatctgctcgcctgattctgcgggttggctcgagtagatatgatggttggaccggttggttcgtttaccgcgctagggttgggctgggatgatgttgcatgcgccgttgcgcgtgatcccgcagcaggacttgcgtttgattgccagatctcgttacgattatgtgatttggtttggactttttagatctgtagcttctgcttatgtgccagatgcgcctactgctcatatgcctgatgataatcataaatggctgtggaactaactagttgattgcggagtcatgtatcagctacaggtgtagggactagctacaggtgtagggacttgcgtctaattgtttggtcctttactcatgttgcaattatgcaatttagtttagattgtttgttccactcatctaggctgtaaaagggacactgcttagattgctgtttaatctttttagtagattatattatattggtaacttattacccctattacatgccatacgtgacttctgctcatgcctgatgataatcatagatcactgtggaattaattagttgattgttgaatcatgtttcatgtacataccacggcacaattgcttagttccttaacaaatgcaaattttactgatccatgtatgatttgcgtggttctctaatgtgaaatactatagctacttgttagtaagaatcaggttcgtatgcttaatgctgtatgtgccttctgctcatgcctgatgataatcatatatcactggaattaattagttgatcgtttaatcatatatcaagtacataccatgccacaatttttagtcacttaacccatgcagattgaactggtccctgcatgttttgctaaattgttctattctgattagaccatatatcatgtatttttttttggtaatggttctcttattttaaatgctatatagttctggtacttgttagaaagatctgcttcatagtttagttgcctatccctcgaattaggatgctgagcagctgatcctatagctttgtttcatgtatcaattcttttgtgttcaacagtcagtttttgttagattcattgtaacttatggtcgcttactcttctggtcctcaatgcttgcagggatcccctaaatagaccatgccgaagaagaagcgcaaggtcgggggcgggggctcaggcgggggcgggagcggcggcgggggctctgggggcggcggcagcggcgggggcggcagcgggggcggcgggtcgatgctgttccaggatttcactcatctgtaccctctctcaaagactgttcggttcgagctcaagcctattgggcggactctggagcacatccacgcgaagaacttcctcagccaggacgaaaccatggccgacatgtaccagaaggtcaaggtcatcctcgacgactaccacagggacttcatcgcggacatgatgggcgaggtgaagctgacgaagctcgccgagttctacgacgtctacctcaagttccgcaagaacccgaaggacgacggcctccagaagcagctcaaggacctgcaggccgtcctgaggaaggagtccgtcaagcccatcggcagcggcggcaagtacaagaccggctacgacaggctgttcggcgccaagctgttcaaggacggcaaggagctcggcgacctggcgaagttcgtgatcgcgcaggagggcgagagctcccccaagctggcccacctggcccacttcgagaagttcagcacgtacttcaccggcttccacgacaacaggaagaacatgtacagcgacgaggacaagcacacggccatcgcctaccgcctcatccacgagaacctgccccgcttcatcgacaacctgcagatcctgacgaccatcaagcagaagcactccgccctgtacgaccagatcatcaacgagctcaccgcgagcggcctcgacgtgtccctcgccagccacctcgacggctaccacaagctcctgacccaggagggcatcaccgcctacaaccgcatcatcggcgaggtgaacggctacaccaacaagcacaaccagatctgccacaagtccgagaggatcgccaagctcaggcccctgcacaagcagatcctcagcgacggcatgggcgtgagcttcctcccgtccaagttcgccgacgactccgagatgtgccaggccgtgaacgagttctacaggcactacaccgacgtgttcgccaaggtgcagtccctgttcgacggcttcgacgaccaccagaaggacggcatctacgtggagcacaagaacctgaacgagctgtccaagcaggccttcggcgacttcgccctcctgggccgcgtgctggacggctactacgtggacgtcgtgaacccggagttcaacgagcgcttcgcgaaggcgaagacggacaacgcgaaggccaagctcaccaaggagaaggacaagttcatcaagggcgtccacagcctcgcgtccctggagcaggcgatcgagcaccacaccgcgcgccacgacgacgagtccgtgcaggccggcaagctcggccagtacttcaagcacggcctggccggcgtcgacaacccgatccagaagatccacaacaaccactccaccatcaagggcttcctggagagggagcgcccggcgggcgagcgcgcgctccccaagatcaagtccggcaagaaccccgagatgacgcagctcaggcagctgaaggagctgctcgacaacgcgctcaacgtggcgcacttcgccaagctgctcacgaccaagaccacgctggacaaccaggacggcaacttctacggcgagttcggcgtcctgtacgacgagctggcgaagatcccgaccctgtacaacaaggtccgcgactacctgagccagaagcccttctccaccgagaagtacaagctcaacttcggcaacccgaccctcctgaacggctgggacctcaacaaggagaaggacaacttcggcgtgatcctccagaaggacggctgctactacctcgccctgctggacaaggcgcacaagaaggtcttcgacaacgccccgaacaccggcaagaacgtgtaccagaagatggtgtacaagctgctccccggccccaacaagatgctgccgaaggtgttcttcgcgaagtccaacctcgactactacaaccccagcgccgagctcctggacaagtacgccaagggcacgcacaagaagggcgacaacttcaacctcaaggactgccacgcgctgatcgacttcttcaaggcgggcatcaacaagcaccccgagtggcagcacttcggcttcaagttcagcccgacctccagctacagggacctcagcgacttctaccgcgaggtggagccccagggctaccaggtgaagttcgtcgacatcaacgccgactacatcgacgagctcgtcgagcagggcaagctctacctgttccagatctacaacaaggacttctccccgaaggcccacggcaagccgaacctccacacgctctacttcaaggccctcttcagcgaggacaacctggccgacccgatctacaagctcaacggcgaggcgcagatcttctaccgcaaggccagcctggacatgaacgaaacgaccatccacagggccggcgaggtcctggagaacaagaacccggacaacccgaagaagaggcagttcgtctacgacatcatcaaggacaagaggtacacccaggacaagttcatgctccacgtcccgatcaccatgaacttcggcgtccagggcatgaccatcaaggagttcaacaagaaggtcaaccagagcatccagcagtacgacgaggtgaacgtcatcggcatcgaccgcggcgagaggcacctgctctacctgacggtcatcaactccaagggcgagatcctcgagcagcgcagcctgaacgacatcacgaccgcgagcgccaacggcacgcaggtcaccacgccgtaccacaagatcctcgacaagcgcgagatcgagaggctgaacgcgcgccagggctggggcgagatcgaaacgatcaaggagctcaagtccggctacctcagccacgtcgtgcaccagatcaaccagctcatgctgaagtacaacgcgatcgtggtcctcgaggacctgaacttcggcttcaagaggggccgcttcaaggtggagaagcagatctaccagaacttcgagaacgccctgatcaagaagctcaaccacctggtcctcaaggacaaggcggacgacgagatcggcagctacaagaacgcgctccagctgaccaacaacttcacggacctcaagtccatcggcaagcagacgggcttcctgttctacgtgccggcgtggaacacctccaagatcgacccggaaaccggcttcgtcgacctgctcaagccgcgctacgagaacatcgcgcagtcccaggcgttcttcggcaagttcgacaagatctgctacaacaccgacaagggctacttcgagttccacatcgactacgcgaagttcaccgacaaggccaagaactccaggcagaagtgggccatctgcagccacggcgacaagcgctacgtgtacgacaagacggcgaaccagaacaagggcgcggccaagggcatcaacgtgaacgacgagctgaagtccctcttcgcgcgctaccacatcaacgacaagcagccgaacctcgtcatggacatctgccagaacaacgacaaggagttccacaagagcctgatgtgcctgctcaagaccctgctcgccctccgctactccaacgcgagctccgacgaggacttcatcctcagccccgtcgcgaacgacgagggcgtgttcttcaactccgccctcgcggacgacacgcagccgcagaacgccgacgcgaacggcgcctaccacatcgccctcaagggcctgtggctgctcaacgagctcaagaactccgacgacctgaacaaggtgaagctcgccattgacaaccagacgtggctgaatttcgctcagaatagggggggcgggggctcaggcgggggcgggagcggcggcgggggctctgggggcggcggcagcggcgggggcggcagcgggggcggcgggtcgccgaagaagaagcgcaaggtgtccggcggcagctccggcggcagcccgaagaagaagcgcaaagtgtgagggacccgatcgttcaaacatttggcaataaagtttcttaagattgaatcctgttgccggtcttgcgatgattatcatataatttctgttgaattacgttaagcatgtaataattaacatgtaatgcatgacgttatttatgagatgggtttttatgattagagtcccgcaattatacatttaatacgcgatagaaaacaaaatatagcgcgcaaactaggataaattatcgcgcgcggtgtcatctatgttactagatcggtaccgaattcattatgtggtctaggtaggttctatatataagaaaacttgaaatgttctaaaaaaaaattcaagcccatgcatgattgaagcaaacggtatagcaacggtgttaacctgatctagtgatctcttgcaatccttaacggccacctaccgcaggtagcaaacggcgtccccctcctcgatatctccgcggcgacctctggctttttccgcggaattgcgcggtggggacggattccacgagaccgcgacgcaaccgcctctcgccgctgggccccacaccgctcggtgccgtagcctcacgggactctttctccctcctcccccgttataaattggcttcatcccctccttgcctcatccatccaaatcccagtccccaatcccatcccttcgtaggagaaattcatcgaagctaagcgaatcctcgcgatcctctcaaggtactgcgagttttcgatccccctctcgacccctcgtatgtttgtgtttgtcgtagcgtttgattaggtatgctttccctgtttgtgttcgtcgtagcgtttgattaggtatgctttccctgttcgtgttcatcgtagtgtttgattaggtcgtgtgaggcgatggcctgctcgcgtccttcgatctgtagtcgatttgcgggtcgtggtgtagatctgcgggctgtgatgaagttatttggtgtgatctgctcgcctgattctgcgggttggctcgagtagatatgatggttggaccggttggttcgtttaccgcgctagggttgggctgggatgatgttgcatgcgccgttgcgcgtgatcccgcagcaggacttgcgtttgattgccagatctcgttacgattatgtgatttggtttggactttttagatctgtagcttctgcttatgtgccagatgcgcctactgctcatatgcctgatgataatcataaatggctgtggaactaactagttgattgcggagtcatgtatcagctacaggtgtagggactagctacaggtgtagggacttgcgtctaattgtttggtcctttactcatgttgcaattatgcaatttagtttagattgtttgttccactcatctaggctgtaaaagggacactgcttagattgctgtttaatctttttagtagattatattatattggtaacttattacccctattacatgccatacgtgacttctgctcatgcctgatgataatcatagatcactgtggaattaattagttgattgttgaatcatgtttcatgtacataccacggcacaattgcttagttccttaacaaatgcaaattttactgatccatgtatgatttgcgtggttctctaatgtgaaatactatagctacttgttagtaagaatcaggttcgtatgcttaatgctgtatgtgccttctgctcatgcctgatgataatcatatatcactggaattaattagttgatcgtttaatcatatatcaagtacataccatgccacaatttttagtcacttaacccatgcagattgaactggtccctgcatgttttgctaaattgttctattctgattagaccatatatcatgtatttttttttggtaatggttctcttattttaaatgctatatagttctggtacttgttagaaagatctgcttcatagtttagttgcctatccctcgaattaggatgctgagcagctgatcctatagctttgtttcatgtatcaattcttttgtgttcaacagtcagtttttgttagattcattgtaacttatggtcgcttactcttctggtcctcaatgcttgcagaagcttgaaattctgatgagtccgtgaggacgaaacgagtaagctcgtcaatttctactgtttgtagatgggaaagaccgaggagaagatctaatttctactgtttgtagatgcaccaaggaaggggaggagatcaatttctactgtttgtagatgtcacagatcacaaacttcaaatgaatttctactgtttgtagatacgcccagaaagcatacgcagtcggccggcatggtcccagcctcctcgctggcgccggctgggcaacatgcttcggcatggcgaatgggacgatcgttcaaacatttggcaataaagtttcttaagattgaatcctgttgccggtcttgcgatgattatcatataatttctgttgaattacgttaagcatgtaataattaacatgtaatgcatgacgttatttatgagatgggtttttatgattagagtcccgcaattatacatttaatacgcgatagaaaacaaaatatagcgcgcaaactaggataaattatcgcgcgcggtgtcatctatgttactagatccctaggctgcagtgcagcgtgacccggtcgtgcccctctctagagataatgagcattgcatgtctaagttataaaaaattaccacatattttttttgtcacacttgtttgaagtgcagtttatctatctttatacatatatttaaactttactctacgaataatataatctatagtactacaataatatcagtgttttagagaatcatataaatgaacagttagacatggtctaaaggacaattgagtattttgacaacaggactctacagttttatctttttagtgtgcatgtgttctcctttttttttgcaaatagcttcacctatataatacttcatccattttattagtacatccatttagggtttagggttaatggtttttatagactaatttttttagtacatctattttattctattttagcctctaaattaagaaaactaaaactctattttagtttttttatttaataatttagatataaaatagaataaaataaagtgactaaaaattaaacaaataccctttaagaaattaaaaaaactaaggaaacatttttcttgtttcgagtagataatgccagcctgttaaacgccgtcgacgagtctaacggacaccaaccagcgaaccagcagcgtcgcgtcgggccaagcgaagcagacggcacggcatctctgtcgctgcctctggacccctctcgagagttccgctccaccgttggacttgctccgctgtcggcatccagaaattgcgtggcggagcggcagacgtgagccggcacggcaggcggcctcctcctcctctcacggcaccggcagctacgggggattcctttcccaccgctccttcgctttcccttcctcgcccgccgtaataaatagacaccccctccacaccctctttccccaacctcgtgttgttcggagcgcacacacacacaaccagatctcccccaaatccacccgtcggcacctccgcttcaaggtacgccgctcgtcctccccccccccccctctctaccttctctagatcggcgttccggtccatggttagggcccggtagttctacttctgttcatgtttgtgttagatccgtgtttgtgttagatccgtgctgctagcgttcgtacacggatgcgacctgtacgtcagacacgttctgattgctaacttgccagtgtttctctttggggaatcctgggatggctctagccgttccgcagacgggatcgatttcatgattttttttgtttcgttgcatagggtttggtttgcccttttcctttatttcaatatatgccgtgcacttgtttgtcgggtcatcttttcatgcttttttttgtcttggttgtgatgatgtggtctggttgggcggtcgttctagatcggagtagaattctgtttcaaactacctggtggatttattaattttggatctgtatgtgtgtgccatacatattcatagttacgaattgaagatgatggatggaaatatcgatctaggataggtatacatgttgatgcgggttttactgatgcatatacagagatgctttttgttcgcttggttgtgatgatgtggtgtggttgggcggtcgttcattcgttctagatcggagtagaatactgtttcaaactacctggtgtatttattaattttggaactgtatgtgtgtgtcatacatcttcatagttacgagtttaagatggatggaaatatcgatctaggataggtatacatgttgatgtgggttttactgatgcatatacatgatggcatatgcagcatctattcatatgctctaaccttgagtacctatctattataataaacaagtatgttttataattattttgatcttgatatacttggatgatggcatatgcagcagctatatgtggatttttttagccctgccttcatacgctatttatttgcttggtactgtttcttttgtcgatgctcaccctgttgtttggtgttacttctgcagggatcaccgatcatgcaaaaactcattaactcagtgcaaaactatgcctggggcagcaaaacggcgttgactgaactttatggtatggaaaatccgtccagccagccgatggccgagctgtggatgggcgcacatccgaaaagcagttcacgagtgcagaatgccgccggagatatcgtttcactgcgtgatgtgattgagagtgataaatcgactctgctcggagaggccgttgccaaacgctttggcgaactgcctttcctgttcaaagtattatgcgcagcacagccactctccattcaggttcatccaaacaaacacaattctgaaatcggttttgccaaagaaaatgccgcaggtatcccgatggatgccgccgagcgtaactataaagatcctaaccacaagccggagctggtttttgcgctgacgcctttccttgcgatgaacgcgtttcgtgaattttccgagattgtctccctactccagccggtcgcaggtgcacatccggcgattgctcactttttacaacagcctgatgccgaacgtttaagcgaactgttcgccagcctgttgaatatgcagggtgaagaaaaatcccgcgcgctggcgattttaaaatcggccctcgatagccagcagggtgaaccgtggcaaacgattcgtttaatttctgaattttacccggaagacagcggtctgttctccccgctattgctgaatgtggtgaaattgaaccctggcgaagcgatgttcctgttcgctgaaacaccgcacgcttacctgcaaggcgtggcgctggaagtgatggcaaactccgataacgtgctgcgtgcgggtctgacgcctaaatacattgatattccggaactggttgccaatgtgaaattcgaagccaaaccggctaaccagttgttgacccagccggtgaaacaaggtgcagaactggacttcccgattccagtggatgattttgccttctcgctgcatgaccttagtgataaagaaaccaccattagccagcagagtgccgccattttgttctgcgtcgaaggcgatgcaacgttgtggaaaggttctcagcagttacagcttaaaccgggtgaatcagcgtttattgccgccaacgaatcaccggtgactgtcaaaggccacggccgtttagcgcgtgtttacaacaagctgtaagagcttactgaaaaaattaacatctcttgctaagctgggagctcgatccgtcgacctgcagatcgttcaaacatttggcaataaagtttcttaagattgaatcctgttgccggtcttgcgatgattatcatataatttctgttgaattacgttaagcatgtaataattaacatgtaatgcatgacgttatttatgagatgggtttttatgattagagtcccgcaattatacatttaatacgcgatagaaaacaaaatatagcgcgcaaactaggataaattatcgcgcgcggtgtcatctatgttactagatccggaccgcctgcaggcccgggggcgcgccctaattagctaacggccaggatcgccgcgtgagcctttagcaactagctagattaattaacgcaatctgttattaagttgtctaagcgtcaatttgtttacaccacaatatatcctgccaccagccagccaacagctccccgaccggcagctcggcacaaaatcaccactcgatacaggcagcccatcagaattaattctcatgtttgacagcttatcatcgactgcacggtgcaccaatgcttctggcgtcaggcagccatcggaagctgtggtatggctgtgcaggtcgtaaatcactgcataattcgtgtcgctcaaggcgcactcccgttctggataatgttttttgcgccgacatcataacggttctggcaaatattctgaaatgagctgttgacaattaatcatccggctcgtataatgtgtggaattgtgagcggataacaatttcacacaggaaacagaccatgagggaagcgttgatcgccgaagtatcgactcaactatcagaggtagttggcgtcatcgagcgccatctcgaaccgacgttgctggccgtacatttgtacggctccgcagtggatggcggcctgaagccacacagtgatattgatttgctggttacggtgaccgtaaggcttgatgaaacaacgcggcgagctttgatcaacgaccttttggaaacttcggcttcccctggagagagcgagattctccgcgctgtagaagtcaccattgttgtgcacgacgacatcattccgtggcgttatccagctaagcgcgaactgcaatttggagaatggcagcgcaatgacattcttgcaggtatcttcgagccagccacgatcgacattgatctggctatcttgctgacaaaagcaagagaacatagcgttgccttggtaggtccagcggcggaggaactctttgatccggttcctgaacaggatctatttgaggcgctaaatgaaaccttaacgctatggaactcgccgcccgactgggctggcgatgagcgaaatgtagtgcttacgttgtcccgcatttggtacagcgcagtaaccggcaaaatcgcgccgaaggatgtcgctgccgactgggcaatggagcgcctgccggcccagtatcagcccgtcatacttgaagctaggcaggcttatcttggacaagaagatcgcttggcctcgcgcgcagatcagttggaagaatttgttcactacgtgaaaggcgagatcaccaaagtagtcggcaaataaagctctagtggatctccgtacccagggatctggctcgcggcggacgcacgacgccggggcgagaccataggcgatctcctaaatcaatagtagctgtaacctcgaagcgtttcacttgtaacaacgattgagaatttttgtcataaaattgaaatacttggttcgcatttttgtcatccgcggtcagccgcaattctgacgaactgcccatttagctggagatgattgtacatccttcacgtgaaaatttctcaagcgctgtgaacaagggttcagattttagattgaaaggtgagccgttgaaacacgttcttcttgtcgatgacgacgtcgctatgcggcatcttattattgaataccttacgatccacgccttcaaagtgaccgcggtagccgacagcacccagttcacaagagtactctcttccgcgacggtcgatgtcgtggttgttgatctagatttaggtcgtgaagatgggctcgagatcgttcgtaatctggcggcaaagtctgatattccaatcataattatcagtggcgaccgccttgaggagacggataaagttgttgcactcgagctaggagcaagtgattttatcgctaagccgttcagtatcagagagtttctagcacgcattcgggttgccttgcgcgtgcgccccaacgttgtccgctccaaagaccgacggtctttttgttttactgactggacacttaatctcaggcaacgtcgcttgatgtccgaagctggcggtgaggtgaaacttacggcaggtgagttcaatcttctcctcgcgtttttagagaaaccccgcgacgttctatcgcgcgagcaacttctcattgccagtcgagtacgcgacgaggaggtttatgacaggagtatagatgttctcattttgaggctgcgccgcaaacttgaggcagatccgtcaagccctcaactgataaaaacagcaagaggtgccggttatttctttgacgcggacgtgcaggtttcgcacggggggacgatggcagcctgagccaattcccagatccccgaggaatcggcgtgagcggtcgcaaaccatccggcccggtacaaatcggcgcggcgctgggtgatgacctggtggagaagttgaaggccgcgcaggccgcccagcggcaacgcatcgaggcagaagcacgccccggtgaatcgtggcaagcggccgctgatcgaatccgcaaagaatcccggcaaccgccggcagccggtgcgccgtcgattaggaagccgcccaagggcgacgagcaaccagattttttcgttccgatgctctatgacgtgggcacccgcgatagtcgcagcatcatggacgtggccgttttccgtctgtcgaagcgtgaccgacgagctggcgaggtgatccgctacgagcttccagacgggcacgtagaggtttccgcagggccggccggcatggccagtgtgtgggattacgacctggtactgatggcggtttcccatctaaccgaatccatgaaccgataccgggaagggaagggagacaagcccggccgcgtgttccgtccacacgttgcggacgtactcaagttctgccggcgagccgatggcggaaagcagaaagacgacctggtagaaacctgcattcggttaaacaccacgcacgttgccatgcagcgtacgaagaaggccaagaacggccgcctggtgacggtatccgagggtgaagccttgattagccgctacaagatcgtaaagagcgaaaccgggcggccggagtacatcgagatcgagctggctgattggatgtaccgcgagatcacagaaggcaagaacccggacgtgctgacggttcaccccgattactttttgatcgatcccggcatcggccgttttctctaccgcctggcacgccgcgccgcaggcaaggcagaagccagatggttgttcaagacgatctacgaacgcagtggcagcgccggagagttcaagaagttctgtttcaccgtgcgcaagctgatcgggtcaaatgacctgccggagtacgatttgaaggaggaggcggggcaggctggcccgatcctagtcatgcgctaccgcaacctgatcgagggcgaagcatccgccggttcctaatgtacggagcagatgctagggcaaattgccctagcaggggaaaaaggtcgaaaaggtctctttcctgtggatagcacgtacattgggaacccaaagccgtacattgggaaccggaacccgtacattgggaacccaaagccgtacattgggaaccggtcacacatgtaagtgactgatataaaagagaaaaaaggcgatttttccgcctaaaactctttaaaacttattaaaactcttaaaacccgcctggcctgtgcataactgtctggccagcgcacagccgaagagctgcaaaaagcgcctacccttcggtcgctgcgctccctacgccccgccgcttcgcgtcggcctatcgcggccgctggccgctcaaaaatggctggcctacggccaggcaatctaccagggcgcggacaagccgcgccgtcgccactcgaccgccggcgctgaggtctgcctcgtgaagaaggtgttgctgactcataccaggcctgaatcgccccatcatccagccagaaagtgagggagccacggttgatgagagctttgttgtaggtggaccagttggtgattttgaacttttgctttgccacggaacggtctgcgttgtcgggaagatgcgtgatctgatccttcaactcagcaaaagttcgatttattcaacaaagccgccgtcccgtcaagtcagcgtaatgctctgccagtgttacaaccaattaaccaattctgattagaaaaactcatcgagcatcaaatgaaactgcaatttattcatatcaggattatcaataccatatttttgaaaaagccgtttctgtaatgaaggagaaaactcaccgaggcagttccataggatggcaagatcctggtatcggtctgcgattccgactcgtccaacatcaatacaacctattaatttcccctcgtcaaaaataaggttatcaagtgagaaatcaccatgagtgacgactgaatccggtgagaatggcaaaagctctgcattaatgaatcggccaacgcgcggggagaggcggtttgcgtattgggcgctcttccgcttcctcgctcactgactcgctgcgctcggtcgttcggctgcggcgagcggtatcagctcactcaaaggcggtaatacggttatccacagaatcaggggataacgcaggaaagaacatgtgagcaaaaggccagcaaaaggccaggaaccgtaaaaaggccgcgttgctggcgtttttccataggctccgcccccctgacgagcatcacaaaaatcgacgctcaagtcagaggtggcgaaacccgacaggactataaagataccaggcgtttccccctggaagctccctcgtgcgctctcctgttccgaccctgccgcttaccggatacctgtccgcctttctcccttcgggaagcgtggcgctttctcatagctcacgctgtaggtatctcagttcggtgtaggtcgttcgctccaagctgggctgtgtgcacgaaccccccgttcagcccgaccgctgcgccttatccggtaactatcgtcttgagtccaacccggtaagacacgacttatcgccactggcagcagccactggtaacaggattagcagagcgaggtatgtaggcggtgctacagagttcttgaagtggtggcctaactacggctacactagaagaacagtatttggtatctgcgctctgctgaagccagttaccttcggaaaaagagttggtagctcttgatccggcaaacaaaccaccgctggtagcggtggtttttttgtttgcaagcagcagattacgcgcagaaaaaaaggatctcaagaagatcctttgatcttttctacggggtctgacgctcagtggaacgaaaactcacgttaagggattttggtcatgagattatcaaaaaggatcttcacctagatccttttgatccggaatta

SEQ ID NO: 50 - DNA, 17531 bp, synthetic construct
  source 1..17531: mol_type = other DNA
attcctgtggttggcatgcacatacaaatggacgaacggataaaccttttcacgcccttttaaatatccgattattctaataaacgctcttttctcttaggtttacccgccaatatatcctgtcaaacactgatagtttaaactggcactagcctaacggtgttgactaactaggccgcttccctaattagctaacccgggggcgcgccgggaccggaattcattatgtggtctaggtaggttctatatataagaaaacttgaaatgttctaaaaaaaaattcaagcccatgcatgattgaagcaaacggtatagcaacggtgttaacctgatctagtgatctcttgcaatccttaacggccacctaccgcaggtagcaaacggcgtccccctcctcgatatctccgcggcgacctctggctttttccgcggaattgcgcggtggggacggattccacgagaccgcgacgcaaccgcctctcgccgctgggccccacaccgctcggtgccgtagcctcacgggactctttctccctcctcccccgttataaattggcttcatcccctccttgcctcatccatccaaatcccagtccccaatcccatcccttcgtaggagaaattcatcgaagctaagcgaatcctcgcgatcctctcaaggtactgcgagttttcgatccccctctcgacccctcgtatgtttgtgtttgtcgtagcgtttgattaggtatgctttccctgtttgtgttcgtcgtagcgtttgattaggtatgctttccctgttcgtgttcatcgtagtgtttgattaggtcgtgtgaggcgatggcctgctcgcgtccttcgatctgtagtcgatttgcgggtcgtggtgtagatctgcgggctgtgatgaagttatttggtgtgatctgctcgcctgattctgcgggttggctcgagtagatatgatggttggaccggttggttcgtttaccgcgctagggttgggctgggatgatgttgcatgcgccgttgcgcgtgatcccgcagcaggacttgcgtttgattgccagatctcgttacgattatgtgatttggtttggactttttagatctgtagcttctgcttatgtgccagatgcgcctactgctcatatgcctgatgataatcataaatggctgtggaactaactagttgattgcggagtcatgtatcagctacaggtgtagggactagctacaggtgtagggacttgcgtctaattgtttggtcctttactcatgttgcaattatgcaatttagtttagattgtttgttccactcatctaggctgtaaaagggacactgcttagattgctgtttaatctttttagtagattatattatattggtaacttattacccctattacatgccatacgtgacttctgctcatgcctgatgataatcatagatcactgtggaattaattagttgattgttgaatcatgtttcatgtacataccacggcacaattgcttagttccttaacaaatgcaaattttactgatccatgtatgatttgcgtggttctctaatgtgaaatactatagctacttgttagtaagaatcaggttcgtatgcttaatgctgtatgtgccttctgctcatgcctgatgataatcatatatcactggaattaattagttgatcgtttaatcatatatcaagtacataccatgccacaatttttagtcacttaacccatgcagattgaactggtccctgcatgttttgctaaattgttctattctgattagaccatatatcatgtatttttttttggtaatggttctcttattttaaatgctatatagttctggtacttgttagaaagatctgcttcatagtttagttgcctatccctcgaattaggatgctgagcagctgatcctatagctttgtttcatgtatcaattcttttgtgttcaacagtcagtttttgttagattcattgtaacttatggtcgcttactcttctggtcctcaatgcttgcagggatcccctaaatagaccatgccgaagaagaagcgcaaggtcgggggcgggggctcaggcgggggcgggagcggcggcgggggctctgggggcggcggcagcggcgggggcggcagcgggggcggcgggtcgatgctgttccaggatttcactcatctgtaccctctctcaaagactgttcggttcgagctcaagcctattgggcggactctggagcacatccacgcgaagaacttcctcagccaggacgaaaccatggccgacatgtaccagaaggtcaaggtcatcctcgacgactaccacagggacttcatcgcggacatgatgggcgaggtgaagctgacgaagctcgccgagttctacgacgtctacctcaagttccgcaagaacccgaaggacgacggcctccagaagcagctcaaggacctgcaggccgtcctgaggaaggagtccgtcaagcccatcggcagcggcggcaagtacaagaccggctacgacaggctgttcggcgccaagctgttcaaggacggcaaggagctcggcgacctggcgaagttcgtgatcgcgcaggagggcgagagctcccccaagctggcccacctggcccacttcgagaagttcagcacgtacttcaccggcttccacgacaacaggaagaacatgtacagcgacgaggacaagcacacggccatcgcctaccgcctcatccacgagaacctgccccgcttcatcgacaacctgcagatcctgacgaccatcaagcagaagcactccgccctgtacgaccagatcatcaacgagctcaccgcgagcggcctcgacgtgtccctcgccagccacctcgacggctaccacaagctcctgacccaggagggcatcaccgcctacaaccgcatcatcggcgaggtgaacggctacaccaacaagcacaaccagatctgccacaagtccgagaggatcgccaagctcaggcccctgcacaagcagatcctcagcgacggcatgggcgtgagcttcctcccgtccaagttcgccgacgactccgagatgtgccaggccgtgaacgagttctacaggcactacaccgacgtgttcgccaaggtgcagtccctgttcgacggcttcgacgaccaccagaaggacggcatctacgtggagcacaagaacctgaacgagctgtccaagcaggccttcggcgacttcgccctcctgggccgcgtgctggacggctactacgtggacgtcgtgaacccggagttcaacgagcgcttcgcgaaggcgaagacggacaacgcgaaggccaagctcaccaaggagaaggacaagttcatcaagggcgtccacagcctcgcgtccctggagcaggcgatcgagcaccacaccgcgcgccacgacgacgagtccgtgcaggccggcaagctcggccagtacttcaagcacggcctggccggcgtcgacaacccgatccagaagatccacaacaaccactccaccatcaagggcttcctggagagggagcgcccggcgggcgagcgcgcgctccccaagatcaagtccggcaagaaccccgagatgacgcagctcaggcagctgaaggagctgctcgacaacgcgctcaacgtggcgcacttcgccaagctgctcacgaccaagaccacgctggacaaccaggacggcaacttctacggcgagttcggcgtcctgtacgacgagctggcgaagatcccgaccctgtacaacaaggtccgcgactacctgagccagaagcccttctccaccgagaagtacaagctcaacttcggcaacccgaccctcctgaacggctgggacctcaacaaggagaaggacaacttcggcgtgatcctccagaaggacggctgctactacctcgccctgctggacaaggcgcacaagaaggtcttcgacaacgccccgaacaccggcaagaacgtgtaccagaagatggtgtacaagctgctccccggccccaacaagatgctgccgaaggtgttcttcgcgaagtccaacctcgactactacaaccccagcgccgagctcctggacaagtacgccaagggcacgcacaagaagggcgacaacttcaacctcaaggactgccacgcgctgatcgacttcttcaaggcgggcatcaacaagcaccccgagtggcagcacttcggcttcaagttcagcccgacctccagctacagggacctcagcgacttctaccgcgaggtggagccccagggctaccaggtgaagttcgtcgacatcaacgccgactacatcgacgagctcgtcgagcagggcaagctctacctgttccagatctacaacaaggacttctccccgaaggcccacggcaagccgaacctccacacgctctacttcaaggccctcttcagcgaggacaacctggccgacccgatctacaagctcaacggcgaggcgcagatcttctaccgcaaggccagcctggacatgaacgaaacgaccatccacagggccggcgaggtcctggagaacaagaacccggacaacccgaagaagaggcagttcgtctacgacatcatcaaggacaagaggtacacccaggacaagttcatgctccacgtcccgatcaccatgaacttcggcgtccagggcatgaccatcaaggagttcaacaagaaggtcaaccagagcatccagcagtacgacgaggtgaacgtcatcggcatcgaccgcggcgagaggcacctgctctacctgacggtcatcaactccaagggcgagatcctcgagcagcgcagcctgaacgacatcacgaccgcgagcgccaacggcacgcaggtcaccacgccgtaccacaagatcctcgacaagcgcgagatcgagaggctgaacgcgcgcaagggctggggcgagatcgaaacgatcaaggagctcaagtccggctacctcagccacgtcgtgcaccagatcaaccagctcatgctgaagtacaacgcgatcgtggtcctcgaggacctgaacttcggcttcaagaggggccgcttcaaggtggagaagcagatctaccagaacttcgagaacgccctgatcaagaagctcaaccacctggtcctcaaggacaaggcggacgacgagatcggcagctacaagaacgcgctccagctgaccaacaacttcacggacctcaagtccatcggcaagcagacgggcttcctgttctacgtgccggcgtggaacacctccaagatcgacccggaaaccggcttcgtcgacctgctcaagccgcgctacgagaacatcgcgcagtcccaggcgttcttcggcaagttcgacaagatctgctacaacaccgacaagggctacttcgagttccacatcgactacgcgaagttcaccgacaaggccaagaactccaggcagaagtgggccatctgcagccacggcgacaagcgctacgtgtacgacaagacggcgaaccagaacaagggcgcggccaagggcatcaacgtgaacgacgagctgaagtccctcttcgcgcgctaccacatcaacgacaagcagccgaacctcgtcatggacatctgccagaacaacgacaaggagttccacaagagcctgatgtgcctgctcaagaccctgctcgccctccgctactccaacgcgagctccgacgaggacttcatcctcagccccgtcgcgaacgacgagggcgtgttcttcaactccgccctcgcggacgacacgcagccgcagaacgccgacgcgaacggcgcctaccacatcgccctcaagggcctgtggctgctcaacgagctcaagaactccgacgacctgaacaaggtgaagctcgccattgacaaccagacgtggctgaatttcgctcagaatagggggggcgggggctcaggcgggggcgggagcggcggcgggggctctgggggcggcggcagcggcgggggcggcagcgggggcggcgggtcgccgaagaagaagcgcaaggtgtccggcggcagctccggcggcagcccgaagaagaagcgcaaagtgtgagggacccgatcgttcaaacatttggcaataaagtttcttaagattgaatcctgttgccggtcttgcgatgattatcatataatttctgttgaattacgttaagcatgtaataattaacatgtaatgcatgacgttatttatgagatgggtttttatgattagagtcccgcaattatacatttaatacgcgatagaaaacaaaatatagcgcgcaaactaggataaattatcgcgcgcggtgtcatctatgttactagatcggtaccgaattcattatgtggtctaggtaggttctatatataagaaaacttgaaatgttctaaaaaaaaattcaagcccatgcatgattgaagcaaacggtatagcaacggtgttaacctgatctagtgatctcttgcaatccttaacggccacctaccgcaggtagcaaacggcgtccccctcctcgatatctccgcggcgacctctggctttttccgcggaattgcgcggtggggacggattccacgagaccgcgacgcaaccgcctctcgccgctgggccccacaccgctcggtgccgtagcctcacgggactctttctccctcctcccccgttataaattggcttcatcccctccttgcctcatccatccaaatcccagtccccaatcccatcccttcgtaggagaaattcatcgaagctaagcgaatcctcgcgatcctctcaaggtactgcgagttttcgatccccctctcgacccctcgtatgtttgtgtttgtcgtagcgtttgattaggtatgctttccctgtttgtgttcgtcgtagcgtttgattaggtatgctttccctgttcgtgttcatcgtagtgtttgattaggtcgtgtgaggcgatggcctgctcgcgtccttcgatctgtagtcgatttgcgggtcgtggtgtagatctgcgggctgtgatgaagttatttggtgtgatctgctcgcctgattctgcgggttggctcgagtagatatgatggttggaccggttggttcgtttaccgcgctagggttgggctgggatgatgttgcatgcgccgttgcgcgtgatcccgcagcaggacttgcgtttgattgccagatctcgttacgattatgtgatttggtttggactttttagatctgtagcttctgcttatgtgccagatgcgcctactgctcatatgcctgatgataatcataaatggctgtggaactaactagttgattgcggagtcatgtatcagctacaggtgtagggactagctacaggtgtagggacttgcgtctaattgtttggtcctttactcatgttgcaattatgcaatttagtttagattgtttgttccactcatctaggctgtaaaagggacactgcttagattgctgtttaatctttttagtagattatattatattggtaacttattacccctattacatgccatacgtgacttctgctcatgcctgatgataatcatagatcactgtggaattaattagttgattgttgaatcatgtttcatgtacataccacggcacaattgcttagttccttaacaaatgcaaattttactgatccatgtatgatttgcgtggttctctaatgtgaaatactatagctacttgttagtaagaatcaggttcgtatgcttaatgctgtatgtgccttctgctcatgcctgatgataatcatatatcactggaattaattagttgatcgtttaatcatatatcaagtacataccatgccacaatttttagtcacttaacccatgcagattgaactggtccctgcatgttttgctaaattgttctattctgattagaccatatatcatgtatttttttttggtaatggttctcttattttaaatgctatatagttctggtacttgttagaaagatctgcttcatagtttagttgcctatccctcgaattaggatgctgagcagctgatcctatagctttgtttcatgtatcaattcttttgtgttcaacagtcagtttttgttagattcattgtaacttatggtcgcttactcttctggtcctcaatgcttgcagaagcttgaaattctgatgagtccgtgaggacgaaacgagtaagctcgtcaatttctactgtttgtagatgggaaagaccgaggagaagatctaatttctactgtttgtagatgcaccaaggaaggggaggagatcaatttctactgtttgtagatgtcacagatcacaaacttcaaatgaatttctactgtttgtagatacgcccagaaagcatacgcagtcggccggcatggtcccagcctcctcgctggcgccggctgggcaacatgcttcggcatggcgaatgggacgatcgttcaaacatttggcaataaagtttcttaagattgaatcctgttgccggtcttgcgatgattatcatataatttctgttgaattacgttaagcatgtaataattaacatgtaatgcatgacgttatttatgagatgggtttttatgattagagtcccgcaattatacatttaatacgcgatagaaaacaaaatatagcgcgcaaactaggataaattatcgcgcgcggtgtcatctatgttactagatccctaggctgcagtgcagcgtgacccggtcgtgcccctctctagagataatgagcattgcatgtctaagttataaaaaattaccacatattttttttgtcacacttgtttgaagtgcagtttatctatctttatacatatatttaaactttactctacgaataatataatctatagtactacaataatatcagtgttttagagaatcatataaatgaacagttagacatggtctaaaggacaattgagtattttgacaacaggactctacagttttatctttttagtgtgcatgtgttctcctttttttttgcaaatagcttcacctatataatacttcatccattttattagtacatccatttagggtttagggttaatggtttttatagactaatttttttagtacatctattttattctattttagcctctaaattaagaaaactaaaactctattttagtttttttatttaataatttagatataaaatagaataaaataaagtgactaaaaattaaacaaataccctttaagaaattaaaaaaactaaggaaacatttttcttgtttcgagtagataatgccagcctgttaaacgccgtcgacgagtctaacggacaccaaccagcgaaccagcagcgtcgcgtcgggccaagcgaagcagacggcacggcatctctgtcgctgcctctggacccctctcgagagttccgctccaccgttggacttgctccgctgtcggcatccagaaattgcgtggcggagcggcagacgtgagccggcacggcaggcggcctcctcctcctctcacggcaccggcagctacgggggattcctttcccaccgctccttcgctttcccttcctcgcccgccgtaataaatagacaccccctccacaccctctttccccaacctcgtgttgttcggagcgcacacacacacaaccagatctcccccaaatccacccgtcggcacctccgcttcaaggtacgccgctcgtcctccccccccccccctctctaccttctctagatcggcgttccggtccatggttagggcccggtagttctacttctgttcatgtttgtgttagatccgtgtttgtgttagatccgtgctgctagcgttcgtacacggatgcgacctgtacgtcagacacgttctgattgctaacttgccagtgtttctctttggggaatcctgggatggctctagccgttccgcagacgggatcgatttcatgattttttttgtttcgttgcatagggtttggtttgcccttttcctttatttcaatatatgccgtgcacttgtttgtcgggtcatcttttcatgcttttttttgtcttggttgtgatgatgtggtctggttgggcggtcgttctagatcggagtagaattctgtttcaaactacctggtggatttattaattttggatctgtatgtgtgtgccatacatattcatagttacgaattgaagatgatggatggaaatatcgatctaggataggtatacatgttgatgcgggttttactgatgcatatacagagatgctttttgttcgcttggttgtgatgatgtggtgtggttgggcggtcgttcattcgttctagatcggagtagaatactgtttcaaactacctggtgtatttattaattttggaactgtatgtgtgtgtcatacatcttcatagttacgagtttaagatggatggaaatatcgatctaggataggtatacatgttgatgtgggttttactgatgcatatacatgatggcatatgcagcatctattcatatgctctaaccttgagtacctatctattataataaacaagtatgttttataattattttgatcttgatatacttggatgatggcatatgcagcagctatatgtggatttttttagccctgccttcatacgctatttatttgcttggtactgtttcttttgtcgatgctcaccctgttgtttggtgttacttctgcagggatcaccgatcatgcaaaaactcattaactcagtgcaaaactatgcctggggcagcaaaacggcgttgactgaactttatggtatggaaaatccgtccagccagccgatggccgagctgtggatgggcgcacatccgaaaagcagttcacgagtgcagaatgccgccggagatatcgtttcactgcgtgatgtgattgagagtgataaatcgactctgctcggagaggccgttgccaaacgctttggcgaactgcctttcctgttcaaagtattatgcgcagcacagccactctccattcaggttcatccaaacaaacacaattctgaaatcggttttgccaaagaaaatgccgcaggtatcccgatggatgccgccgagcgtaactataaagatcctaaccacaagccggagctggtttttgcgctgacgcctttccttgcgatgaacgcgtttcgtgaattttccgagattgtctccctactccagccggtcgcaggtgcacatccggcgattgctcactttttacaacagcctgatgccgaacgtttaagcgaactgttcgccagcctgttgaatatgcagggtgaagaaaaatcccgcgcgctggcgattttaaaatcggccctcgatagccagcagggtgaaccgtggcaaacgattcgtttaatttctgaattttacccggaagacagcggtctgttctccccgctattgctgaatgtggtgaaattgaaccctggcgaagcgatgttcctgttcgctgaaacaccgcacgcttacctgcaaggcgtggcgctggaagtgatggcaaactccgataacgtgctgcgtgcgggtctgacgcctaaatacattgatattccggaactggttgccaatgtgaaattcgaagccaaaccggctaaccagttgttgacccagccggtgaaacaaggtgcagaactggacttcccgattccagtggatgattttgccttctcgctgcatgaccttagtgataaagaaaccaccattagccagcagagtgccgccattttgttctgcgtcgaaggcgatgcaacgttgtggaaaggttctcagcagttacagcttaaaccgggtgaatcagcgtttattgccgccaacgaatcaccggtgactgtcaaaggccacggccgtttagcgcgtgtttacaacaagctgtaagagcttactgaaaaaattaacatctcttgctaagctgggagctcgatccgtcgacctgcagatcgttcaaacatttggcaataaagtttcttaagattgaatcctgttgccggtcttgcgatgattatcatataatttctgttgaattacgttaagcatgtaataattaacatgtaatgcatgacgttatttatgagatgggtttttatgattagagtcccgcaattatacatttaatacgcgatagaaaacaaaatatagcgcgcaaactaggataaattatcgcgcgcggtgtcatctatgttactagatccggaccgcctgcaggcccgggggcgcgccctaattagctaacggccaggatcgccgcgtgagcctttagcaactagctagattaattaacgcaatctgttattaagttgtctaagcgtcaatttgtttacaccacaatatatcctgccaccagccagccaacagctccccgaccggcagctcggcacaaaatcaccactcgatacaggcagcccatcagaattaattctcatgtttgacagcttatcatcgactgcacggtgcaccaatgcttctggcgtcaggcagccatcggaagctgtggtatggctgtgcaggtcgtaaatcactgcataattcgtgtcgctcaaggcgcactcccgttctggataatgttttttgcgccgacatcataacggttctggcaaatattctgaaatgagctgttgacaattaatcatccggctcgtataatgtgtggaattgtgagcggataacaatttcacacaggaaacagaccatgagggaagcgttgatcgccgaagtatcgactcaactatcagaggtagttggcgtcatcgagcgccatctcgaaccgacgttgctggccgtacatttgtacggctccgcagtggatggcggcctgaagccacacagtgatattgatttgctggttacggtgaccgtaaggcttgatgaaacaacgcggcgagctttgatcaacgaccttttggaaacttcggcttcccctggagagagcgagattctccgcgctgtagaagtcaccattgttgtgcacgacgacatcattccgtggcgttatccagctaagcgcgaactgcaatttggagaatggcagcgcaatgacattcttgcaggtatcttcgagccagccacgatcgacattgatctggctatcttgctgacaaaagcaagagaacatagcgttgccttggtaggtccagcggcggaggaactctttgatccggttcctgaacaggatctatttgaggcgctaaatgaaaccttaacgctatggaactcgccgcccgactgggctggcgatgagcgaaatgtagtgcttacgttgtcccgcatttggtacagcgcagtaaccggcaaaatcgcgccgaaggatgtcgctgccgactgggcaatggagcgcctgccggcccagtatcagcccgtcatacttgaagctaggcaggcttatcttggacaagaagatcgcttggcctcgcgcgcagatcagttggaagaatttgttcactacgtgaaaggcgagatcaccaaagtagtcggcaaataaagctctagtggatctccgtacccagggatctggctcgcggcggacgcacgacgccggggcgagaccataggcgatctcctaaatcaatagtagctgtaacctcgaagcgtttcacttgtaacaacgattgagaatttttgtcataaaattgaaatacttggttcgcatttttgtcatccgcggtcagccgcaattctgacgaactgcccatttagctggagatgattgtacatccttcacgtgaaaatttctcaagcgctgtgaacaagggttcagattttagattgaaaggtgagccgttgaaacacgttcttcttgtcgatgacgacgtcgctatgcggcatcttattattgaataccttacgatccacgccttcaaagtgaccgcggtagccgacagcacccagttcacaagagtactctcttccgcgacggtcgatgtcgtggttgttgatctagatttaggtcgtgaagatgggctcgagatcgttcgtaatctggcggcaaagtctgatattccaatcataattatcagtggcgaccgccttgaggagacggataaagttgttgcactcgagctaggagcaagtgattttatcgctaagccgttcagtatcagagagtttctagcacgcattcgggttgccttgcgcgtgcgccccaacgttgtccgctccaaagaccgacggtctttttgttttactgactggacacttaatctcaggcaacgtcgcttgatgtccgaagctggcggtgaggtgaaacttacggcaggtgagttcaatcttctcctcgcgtttttagagaaaccccgcgacgttctatcgcgcgagcaacttctcattgccagtcgagtacgcgacgaggaggtttatgacaggagtatagatgttctcattttgaggctgcgccgcaaacttgaggcagatccgtcaagccctcaactgataaaaacagcaagaggtgccggttatttctttgacgcggacgtgcaggtttcgcacggggggacgatggcagcctgagccaattcccagatccccgaggaatcggcgtgagcggtcgcaaaccatccggcccggtacaaatcggcgcggcgctgggtgatgacctggtggagaagttgaaggccgcgcaggccgcccagcggcaacgcatcgaggcagaagcacgccccggtgaatcgtggcaagcggccgctgatcgaatccgcaaagaatcccggcaaccgccggcagccggtgcgccgtcgattaggaagccgcccaagggcgacgagcaaccagattttttcgttccgatgctctatgacgtgggcacccgcgatagtcgcagcatcatggacgtggccgttttccgtctgtcgaagcgtgaccgacgagctggcgaggtgatccgctacgagcttccagacgggcacgtagaggtttccgcagggccggccggcatggccagtgtgtgggattacgacctggtactgatggcggtttcccatctaaccgaatccatgaaccgataccgggaagggaagggagacaagcccggccgcgtgttccgtccacacgttgcggacgtactcaagttctgccggcgagccgatggcggaaagcagaaagacgacctggtagaaacctgcattcggttaaacaccacgcacgttgccatgcagcgtacgaagaaggccaagaacggccgcctggtgacggtatccgagggtgaagccttgattagccgctacaagatcgtaaagagcgaaaccgggcggccggagtacatcgagatcgagctggctgattggatgtaccgcgagatcacagaaggcaagaacccggacgtgctgacggttcaccccgattactttttgatcgatcccggcatcggccgttttctctaccgcctggcacgccgcgccgcaggcaaggcagaagccagatggttgttcaagacgatctacgaacgcagtggcagcgccggagagttcaagaagttctgtttcaccgtgcgcaagctgatcgggtcaaatgacctgccggagtacgatttgaaggaggaggcggggcaggctggcccgatcctagtcatgcgctaccgcaacctgatcgagggcgaagcatccgccggttcctaatgtacggagcagatgctagggcaaattgccctagcaggggaaaaaggtcgaaaaggtctctttcctgtggatagcacgtacattgggaacccaaagccgtacattgggaaccggaacccgtacattgggaacccaaagccgtacattgggaaccggtcacacatgtaagtgactgatataaaagagaaaaaaggcgatttttccgcctaaaactctttaaaacttattaaaactcttaaaacccgcctggcctgtgcataactgtctggccagcgcacagccgaagagctgcaaaaagcgcctacccttcggtcgctgcgctccctacgccccgccgcttcgcgtcggcctatcgcggccgctggccgctcaaaaatggctggcctacggccaggcaatctaccagggcgcggacaagccgcgccgtcgccactcgaccgccggcgctgaggtctgcctcgtgaagaaggtgttgctgactcataccaggcctgaatcgccccatcatccagccagaaagtgagggagccacggttgatgagagctttgttgtaggtggaccagttggtgattttgaacttttgctttgccacggaacggtctgcgttgtcgggaagatgcgtgatctgatccttcaactcagcaaaagttcgatttattcaacaaagccgccgtcccgtcaagtcagcgtaatgctctgccagtgttacaaccaattaaccaattctgattagaaaaactcatcgagcatcaaatgaaactgcaatttattcatatcaggattatcaataccatatttttgaaaaagccgtttctgtaatgaaggagaaaactcaccgaggcagttccataggatggcaagatcctggtatcggtctgcgattccgactcgtccaacatcaatacaacctattaatttcccctcgtcaaaaataaggttatcaagtgagaaatcaccatgagtgacgactgaatccggtgagaatggcaaaagctctgcattaatgaatcggccaacgcgcggggagaggcggtttgcgtattgggcgctcttccgcttcctcgctcactgactcgctgcgctcggtcgttcggctgcggcgagcggtatcagctcactcaaaggcggtaatacggttatccacagaatcaggggataacgcaggaaagaacatgtgagcaaaaggccagcaaaaggccaggaaccgtaaaaaggccgcgttgctggcgtttttccataggctccgcccccctgacgagcatcacaaaaatcgacgctcaagtcagaggtggcgaaacccgacaggactataaagataccaggcgtttccccctggaagctccctcgtgcgctctcctgttccgaccctgccgcttaccggatacctgtccgcctttctcccttcgggaagcgtggcgctttctcatagctcacgctgtaggtatctcagttcggtgtaggtcgttcgctccaagctgggctgtgtgcacgaaccccccgttcagcccgaccgctgcgccttatccggtaactatcgtcttgagtccaacccggtaagacacgacttatcgccactggcagcagccactggtaacaggattagcagagcgaggtatgtaggcggtgctacagagttcttgaagtggtggcctaactacggctacactagaagaacagtatttggtatctgcgctctgctgaagccagttaccttcggaaaaagagttggtagctcttgatccggcaaacaaaccaccgctggtagcggtggtttttttgtttgcaagcagcagattacgcgcagaaaaaaaggatctcaagaagatcctttgatcttttctacggggtctgacgctcagtggaacgaaaactcacgttaagggattttggtcatgagattatcaaaaaggatcttcacctagatccttttgatccggaatta

SEQ ID NO: 51 - DNA, 17531 bp, synthetic construct
  source 1..17531: mol_type = other DNA
attcctgtggttggcatgcacatacaaatggacgaacggataaaccttttcacgcccttttaaatatccgattattctaataaacgctcttttctcttaggtttacccgccaatatatcctgtcaaacactgatagtttaaactggcactagcctaacggtgttgactaactaggccgcttccctaattagctaacccgggggcgcgccgggaccggaattcattatgtggtctaggtaggttctatatataagaaaacttgaaatgttctaaaaaaaaattcaagcccatgcatgattgaagcaaacggtatagcaacggtgttaacctgatctagtgatctcttgcaatccttaacggccacctaccgcaggtagcaaacggcgtccccctcctcgatatctccgcggcgacctctggctttttccgcggaattgcgcggtggggacggattccacgagaccgcgacgcaaccgcctctcgccgctgggccccacaccgctcggtgccgtagcctcacgggactctttctccctcctcccccgttataaattggcttcatcccctccttgcctcatccatccaaatcccagtccccaatcccatcccttcgtaggagaaattcatcgaagctaagcgaatcctcgcgatcctctcaaggtactgcgagttttcgatccccctctcgacccctcgtatgtttgtgtttgtcgtagcgtttgattaggtatgctttccctgtttgtgttcgtcgtagcgtttgattaggtatgctttccctgttcgtgttcatcgtagtgtttgattaggtcgtgtgaggcgatggcctgctcgcgtccttcgatctgtagtcgatttgcgggtcgtggtgtagatctgcgggctgtgatgaagttatttggtgtgatctgctcgcctgattctgcgggttggctcgagtagatatgatggttggaccggttggttcgtttaccgcgctagggttgggctgggatgatgttgcatgcgccgttgcgcgtgatcccgcagcaggacttgcgtttgattgccagatctcgttacgattatgtgatttggtttggactttttagatctgtagcttctgcttatgtgccagatgcgcctactgctcatatgcctgatgataatcataaatggctgtggaactaactagttgattgcggagtcatgtatcagctacaggtgtagggactagctacaggtgtagggacttgcgtctaattgtttggtcctttactcatgttgcaattatgcaatttagtttagattgtttgttccactcatctaggctgtaaaagggacactgcttagattgctgtttaatctttttagtagattatattatattggtaacttattacccctattacatgccatacgtgacttctgctcatgcctgatgataatcatagatcactgtggaattaattagttgattgttgaatcatgtttcatgtacataccacggcacaattgcttagttccttaacaaatgcaaattttactgatccatgtatgatttgcgtggttctctaatgtgaaatactatagctacttgttagtaagaatcaggttcgtatgcttaatgctgtatgtgccttctgctcatgcctgatgataatcatatatcactggaattaattagttgatcgtttaatcatatatcaagtacataccatgccacaatttttagtcacttaacccatgcagattgaactggtccctgcatgttttgctaaattgttctattctgattagaccatatatcatgtatttttttttggtaatggttctcttattttaaatgctatatagttctggtacttgttagaaagatctgcttcatagtttagttgcctatccctcgaattaggatgctgagcagctgatcctatagctttgtttcatgtatcaattcttttgtgttcaacagtcagtttttgttagattcattgtaacttatggtcgcttactcttctggtcctcaatgcttgcagggatcccctaaatagaccatgccgaagaagaagcgcaaggtcgggggcgggggctcaggcgggggcgggagcggcggcgggggctctgggggcggcggcagcggcgggggcggcagcgggggcggcgggtcgatgctgttccaggatttcactcatctgtaccctctctcaaagactgttcggttcgagctcaagcctattgggcggactctggagcacatccacgcgaagaacttcctcagccaggacgaaaccatggccgacatgtaccagaaggtcaaggtcatcctcgacgactaccacagggacttcatcgcggacatgatgggcgaggtgaagctgacgaagctcgccgagttctacgacgtctacctcaagttccgcaagaacccgaaggacgacggcctccagaagcagctcaaggacctgcaggccgtcctgaggaaggagtccgtcaagcccatcggcagcggcggcaagtacaagaccggctacgacaggctgttcggcgccaagctgttcaaggacggcaaggagctcggcgacctggcgaagttcgtgatcgcgcaggagggcgagagctcccccaagctggcccacctggcccacttcgagaagttcagcacgtacttcaccggcttccacgacaacaggaagaacatgtacagcgacgaggacaagcacacggccatcgcctaccgcctcatccacgagaacctgccccgcttcatcgacaacctgcagatcctgacgaccatcaagcagaagcactccgccctgtacgaccagatcatcaacgagctcaccgcgagcggcctcgacgtgtccctcgccagccacctcgacggctaccacaagctcctgacccaggagggcatcaccgcctacaaccgcatcatcggcgaggtgaacggctacaccaacaagcacaaccagatctgccacaagtccgagaggatcgccaagctcaggcccctgcacaagcagatcctcagcgacggcatgggcgtgagcttcctcccgtccaagttcgccgacgactccgagatgtgccaggccgtgaacgagttctacaggcactacaccgacgtgttcgccaaggtgcagtccctgttcgacggcttcgacgaccaccagaaggacggcatctacgtggagcacaagaacctgaacgagctgtccaagcaggccttcggcgacttcgccctcctgggccgcgtgctggacggctactacgtggacgtcgtgaacccggagttcaacgagcgcttcgcgaaggcgaagacggacaacgcgaaggccaagctcaccaaggagaaggacaagttcatcaagggcgtccacagcctcgcgtccctggagcaggcgatcgagcaccacaccgcgcgccacgacgacgagtccgtgcaggccggcaagctcggccagtacttcaagcacggcctggccggcgtcgacaacccgatccagaagatccacaacaaccactccaccatcaagggcttcctggagagggagcgcccggcgggcgagcgcgcgctccccaagatcaagtccggcaagaaccccgagatgacgcagctcaggcagctgaaggagctgctcgacaacgcgctcaacgtggcgcacttcgccaagctgctcacgaccaagaccacgctggacaaccaggacggcaacttctacggcgagttcggcgtcctgtacgacgagctggcgaagatcccgaccctgtacaacaaggtccgcgactacctgagccagaagcccttctccaccgagaagtacaagctcaacttcggcaacccgaccctcctgaacggctgggacctcaacaaggagaaggacaacttcggcgtgatcctccagaaggacggctgctactacctcgccctgctggacaaggcgcacaagaaggtcttcgacaacgccccgaacaccggcaagaacgtgtaccagaagatggtgtacaagctgctccccggccccaacaagatgctgccgaaggtgttcttcgcgaagtccaacctcgactactacaaccccagcgccgagctcctggacaagtacgccaagggcacgcacaagaagggcgacaacttcaacctcaaggactgccacgcgctgatcgacttcttcaaggcgggcatcaacaagcaccccgagtggcagcacttcggcttcaagttcagcccgacctccagctacagggacctcagcgacttctaccgcgaggtggagccccagggctaccaggtgaagttcgtcgacatcaacgccgactacatcgacgagctcgtcgagcagggcaagctctacctgttccagatctacaacaaggacttctccccgaaggcccacggcaagccgaacctccacacgctctacttcaaggccctcttcagcgaggacaacctggccgacccgatctacaagctcaacggcgaggcgcagatcttctaccgcaaggccagcctggacatgaacgaaacgaccatccacagggccggcgaggtcctggagaacaagaacccggacaacccgaagaagaggcagttcgtctacgacatcatcaaggacaagaggtacacccaggacaagttcatgctccacgtcccgatcaccatgaacttcggcgtccagggcatgaccatcaaggagttcaacaagaaggtcaaccagagcatccagcagtacgacgaggtgaacgtcatcggcatcgaccgcggcgagaggcacctgctctacctgacggtcatcaactccaagggcgagatcctcgagcagcgcagcctgaacgacatcacgaccgcgagcgccaacggcacgcaggtcaccacgccgtaccacagcctcctggacaagaaggagaaggagaggttcgaggcgcgcgtcggctggggcgagatcgaaacgatcaaggagctcaagtccggctacctcagccacgtcgtgcaccagatcaaccagctcatgctgaagtacaacgcgatcgtggtcctcgaggacctgaacttcggcttcaagaggggccgcttcaaggtggagaagcagatctaccagaacttcgagaacgccctgatcaagaagctcaaccacctggtcctcaaggacaaggcggacgacgagatcggcagctacaagaacgcgctccagctgaccaacaacttcacggacctcaagtccatcggcaagcagacgggcttcctgttctacgtgccggcgtggaacacctccaagatcgacccggaaaccggcttcgtcgacctgctcaagccgcgctacgagaacatcgcgcagtcccaggcgttcttcggcaagttcgacaagatctgctacaacaccgacaagggctacttcgagttccacatcgactacgcgaagttcaccgacaaggccaagaactccaggcagaagtgggccatctgcagccacggcgacaagcgctacgtgtacgacaagacggcgaaccagaacaagggcgcggccaagggcatcaacgtgaacgacgagctgaagtccctcttcgcgcgctaccacatcaacgacaagcagccgaacctcgtcatggacatctgccagaacaacgacaaggagttccacaagagcctgatgtgcctgctcaagaccctgctcgccctccgctactccaacgcgagctccgacgaggacttcatcctcagccccgtcgcgaacgacgagggcgtgttcttcaactccgccctcgcggacgacacgcagccgcagaacgccgacgcgaacggcgcctaccacatcgccctcaagggcctgtggctgctcaacgagctcaagaactccgacgacctgaacaaggtgaagctcgccattgacaaccagacgtggctgaatttcgctcagaatagggggggcgggggctcaggcgggggcgggagcggcggcgggggctctgggggcggcggcagcggcgggggcggcagcgggggcggcgggtcgccgaagaagaagcgcaaggtgtccggcggcagctccggcggcagcccgaagaagaagcgcaaagtgtgagggacccgatcgttcaaacatttggcaataaagtttcttaagattgaatcctgttgccggtcttgcgatgattatcatataatttctgttgaattacgttaagcatgtaataattaacatgtaatgcatgacgttatttatgagatgggtttttatgattagagtcccgcaattatacatttaatacgcgatagaaaacaaaatatagcgcgcaaactaggataaattatcgcgcgcggtgtcatctatgttactagatcggtaccgaattcattatgtggtctaggtaggttctatatataagaaaacttgaaatgttctaaaaaaaaattcaagcccatgcatgattgaagcaaacggtatagcaacggtgttaacctgatctagtgatctcttgcaatccttaacggccacctaccgcaggtagcaaacggcgtccccctcctcgatatctccgcggcgacctctggctttttccgcggaattgcgcggtggggacggattccacgagaccgcgacgcaaccgcctctcgccgctgggccccacaccgctcggtgccgtagcctcacgggactctttctccctcctcccccgttataaattggcttcatcccctccttgcctcatccatccaaatcccagtccccaatcccatcccttcgtaggagaaattcatcgaagctaagcgaatcctcgcgatcctctcaaggtactgcgagttttcgatccccctctcgacccctcgtatgtttgtgtttgtcgtagcgtttgattaggtatgctttccctgtttgtgttcgtcgtagcgtttgattaggtatgctttccctgttcgtgttcatcgtagtgtttgattaggtcgtgtgaggcgatggcctgctcgcgtccttcgatctgtagtcgatttgcgggtcgtggtgtagatctgcgggctgtgatgaagttatttggtgtgatctgctcgcctgattctgcgggttggctcgagtagatatgatggttggaccggttggttcgtttaccgcgctagggttgggctgggatgatgttgcatgcgccgttgcgcgtgatcccgcagcaggacttgcgtttgattgccagatctcgttacgattatgtgatttggtttggactttttagatctgtagcttctgcttatgtgccagatgcgcctactgctcatatgcctgatgataatcataaatggctgtggaactaactagttgattgcggagtcatgtatcagctacaggtgtagggactagctacaggtgtagggacttgcgtctaattgtttggtcctttactcatgttgcaattatgcaatttagtttagattgtttgttccactcatctaggctgtaaaagggacactgcttagattgctgtttaatctttttagtagattatattatattggtaacttattacccctattacatgccatacgtgacttctgctcatgcctgatgataatcatagatcactgtggaattaattagttgattgttgaatcatgtttcatgtacataccacggcacaattgcttagttccttaacaaatgcaaattttactgatccatgtatgatttgcgtggttctctaatgtgaaatactatagctacttgttagtaagaatcaggttcgtatgcttaatgctgtatgtgccttctgctcatgcctgatgataatcatatatcactggaattaattagttgatcgtttaatcatatatcaagtacataccatgccacaatttttagtcacttaacccatgcagattgaactggtccctgcatgttttgctaaattgttctattctgattagaccatatatcatgtatttttttttggtaatggttctcttattttaaatgctatatagttctggtacttgttagaaagatctgcttcatagtttagttgcctatccctcgaattaggatgctgagcagctgatcctatagctttgtttcatgtatcaattcttttgtgttcaacagtcagtttttgttagattcattgtaacttatggtcgcttactcttctggtcctcaatgcttgcagaagcttgaaattctgatgagtccgtgaggacgaaacgagtaagctcgtcaatttctactgtttgtagatgggaaagaccgaggagaagatctaatttctactgtttgtagatgcaccaaggaaggggaggagatcaatttctactgtttgtagatgtcacagatcacaaacttcaaatgaatttctactgtttgtagatacgcccagaaagcatacgcagtcggccggcatggtcccagcctcctcgctggcgccggctgggcaacatgcttcggcatggcgaatgggacgatcgttcaaacatttggcaataaagtttcttaagattgaatcctgttgccggtcttgcgatgattatcatataatttctgttgaattacgttaagcatgtaataattaacatgtaatgcatgacgttatttatgagatgggtttttatgattagagtcccgcaattatacatttaatacgcgatagaaaacaaaatatagcgcgcaaactaggataaattatcgcgcgcggtgtcatctatgttactagatccctaggctgcagtgcagcgtgacccggtcgtgcccctctctagagataatgagcattgcatgtctaagttataaaaaattaccacatattttttttgtcacacttgtttgaagtgcagtttatctatctttatacatatatttaaactttactctacgaataatataatctatagtactacaataatatcagtgttttagagaatcatataaatgaacagttagacatggtctaaaggacaattgagtattttgacaacaggactctacagttttatctttttagtgtgcatgtgttctcctttttttttgcaaatagcttcacctatataatacttcatccattttattagtacatccatttagggtttagggttaatggtttttatagactaatttttttagtacatctattttattctattttagcctctaaattaagaaaactaaaactctattttagtttttttatttaataatttagatataaaatagaataaaataaagtgactaaaaattaaacaaataccctttaagaaattaaaaaaactaaggaaacatttttcttgtttcgagtagataatgccagcctgttaaacgccgtcgacgagtctaacggacaccaaccagcgaaccagcagcgtcgcgtcgggccaagcgaagcagacggcacggcatctctgtcgctgcctctggacccctctcgagagttccgctccaccgttggacttgctccgctgtcggcatccagaaattgcgtggcggagcggcagacgtgagccggcacggcaggcggcctcctcctcctctcacggcaccggcagctacgggggattcctttcccaccgctccttcgctttcccttcctcgcccgccgtaataaatagacaccccctccacaccctctttccccaacctcgtgttgttcggagcgcacacacacacaaccagatctcccccaaatccacccgtcggcacctccgcttcaaggtacgccgctcgtcctccccccccccccctctctaccttctctagatcggcgttccggtccatggttagggcccggtagttctacttctgttcatgtttgtgttagatccgtgtttgtgttagatccgtgctgctagcgttcgtacacggatgcgacctgtacgtcagacacgttctgattgctaacttgccagtgtttctctttggggaatcctgggatggctctagccgttccgcagacgggatcgatttcatgattttttttgtttcgttgcatagggtttggtttgcccttttcctttatttcaatatatgccgtgcacttgtttgtcgggtcatcttttcatgcttttttttgtcttggttgtgatgatgtggtctggttgggcggtcgttctagatcggagtagaattctgtttcaaactacctggtggatttattaattttggatctgtatgtgtgtgccatacatattcatagttacgaattgaagatgatggatggaaatatcgatctaggataggtatacatgttgatgcgggttttactgatgcatatacagagatgctttttgttcgcttggttgtgatgatgtggtgtggttgggcggtcgttcattcgttctagatcggagtagaatactgtttcaaactacctggtgtatttattaattttggaactgtatgtgtgtgtcatacatcttcatagttacgagtttaagatggatggaaatatcgatctaggataggtatacatgttgatgtgggttttactgatgcatatacatgatggcatatgcagcatctattcatatgctctaaccttgagtacctatctattataataaacaagtatgttttataattattttgatcttgatatacttggatgatggcatatgcagcagctatatgtggatttttttagccctgccttcatacgctatttatttgcttggtactgtttcttttgtcgatgctcaccctgttgtttggtgttacttctgcagggatcaccgatcatgcaaaaactcattaactcagtgcaaaactatgcctggggcagcaaaacggcgttgactgaactttatggtatggaaaatccgtccagccagccgatggccgagctgtggatgggcgcacatccgaaaagcagttcacgagtgcagaatgccgccggagatatcgtttcactgcgtgatgtgattgagagtgataaatcgactctgctcggagaggccgttgccaaacgctttggcgaactgcctttcctgttcaaagtattatgcgcagcacagccactctccattcaggttcatccaaacaaacacaattctgaaatcggttttgccaaagaaaatgccgcaggtatcccgatggatgccgccgagcgtaactataaagatcctaaccacaagccggagctggtttttgcgctgacgcctttccttgcgatgaacgcgtttcgtgaattttccgagattgtctccctactccagccggtcgcaggtgcacatccggcgattgctcactttttacaacagcctgatgccgaacgtttaagcgaactgttcgccagcctgttgaatatgcagggtgaagaaaaatcccgcgcgctggcgattttaaaatcggccctcgatagccagcagggtgaaccgtggcaaacgattcgtttaatttctgaattttacccggaagacagcggtctgttctccccgctattgctgaatgtggtgaaattgaaccctggcgaagcgatgttcctgttcgctgaaacaccgcacgcttacctgcaaggcgtggcgctggaagtgatggcaaactccgataacgtgctgcgtgcgggtctgacgcctaaatacattgatattccggaactggttgccaatgtgaaattcgaagccaaaccggctaaccagttgttgacccagccggtgaaacaaggtgcagaactggacttcccgattccagtggatgattttgccttctcgctgcatgaccttagtgataaagaaaccaccattagccagcagagtgccgccattttgttctgcgtcgaaggcgatgcaacgttgtggaaaggttctcagcagttacagcttaaaccgggtgaatcagcgtttattgccgccaacgaatcaccggtgactgtcaaaggccacggccgtttagcgcgtgtttacaacaagctgtaagagcttactgaaaaaattaacatctcttgctaagctgggagctcgatccgtcgacctgcagatcgttcaaacatttggcaataaagtttcttaagattgaatcctgttgccggtcttgcgatgattatcatataatttctgttgaattacgttaagcatgtaataattaacatgtaatgcatgacgttatttatgagatgggtttttatgattagagtcccgcaattatacatttaatacgcgatagaaaacaaaatatagcgcgcaaactaggataaattatcgcgcgcggtgtcatctatgttactagatccggaccgcctgcaggcccgggggcgcgccctaattagctaacggccaggatcgccgcgtgagcctttagcaactagctagattaattaacgcaatctgttattaagttgtctaagcgtcaatttgtttacaccacaatatatcctgccaccagccagccaacagctccccgaccggcagctcggcacaaaatcaccactcgatacaggcagcccatcagaattaattctcatgtttgacagcttatcatcgactgcacggtgcaccaatgcttctggcgtcaggcagccatcggaagctgtggtatggctgtgcaggtcgtaaatcactgcataattcgtgtcgctcaaggcgcactcccgttctggataatgttttttgcgccgacatcataacggttctggcaaatattctgaaatgagctgttgacaattaatcatccggctcgtataatgtgtggaattgtgagcggataacaatttcacacaggaaacagaccatgagggaagcgttgatcgccgaagtatcgactcaactatcagaggtagttggcgtcatcgagcgccatctcgaaccgacgttgctggccgtacatttgtacggctccgcagtggatggcggcctgaagccacacagtgatattgatttgctggttacggtgaccgtaaggcttgatgaaacaacgcggcgagctttgatcaacgaccttttggaaacttcggcttcccctggagagagcgagattctccgcgctgtagaagtcaccattgttgtgcacgacgacatcattccgtggcgttatccagctaagcgcgaactgcaatttggagaatggcagcgcaatgacattcttgcaggtatcttcgagccagccacgatcgacattgatctggctatcttgctgacaaaagcaagagaacatagcgttgccttggtaggtccagcggcggaggaactctttgatccggttcctgaacaggatctatttgaggcgctaaatgaaaccttaacgctatggaactcgccgcccgactgggctggcgatgagcgaaatgtagtgcttacgttgtcccgcatttggtacagcgcagtaaccggcaaaatcgcgccgaaggatgtcgctgccgactgggcaatggagcgcctgccggcccagtatcagcccgtcatacttgaagctaggcaggcttatcttggacaagaagatcgcttggcctcgcgcgcagatcagttggaagaatttgttcactacgtgaaaggcgagatcaccaaagtagtcggcaaataaagctctagtggatctccgtacccagggatctggctcgcggcggacgcacgacgccggggcgagaccataggcgatctcctaaatcaatagtagctgtaacctcgaagcgtttcacttgtaacaacgattgagaatttttgtcataaaattgaaatacttggttcgcatttttgtcatccgcggtcagccgcaattctgacgaactgcccatttagctggagatgattgtacatccttcacgtgaaaatttctcaagcgctgtgaacaagggttcagattttagattgaaaggtgagccgttgaaacacgttcttcttgtcgatgacgacgtcgctatgcggcatcttattattgaataccttacgatccacgccttcaaagtgaccgcggtagccgacagcacccagttcacaagagtactctcttccgcgacggtcgatgtcgtggttgttgatctagatttaggtcgtgaagatgggctcgagatcgttcgtaatctggcggcaaagtctgatattccaatcataattatcagtggcgaccgccttgaggagacggataaagttgttgcactcgagctaggagcaagtgattttatcgctaagccgttcagtatcagagagtttctagcacgcattcgggttgccttgcgcgtgcgccccaacgttgtccgctccaaagaccgacggtctttttgttttactgactggacacttaatctcaggcaacgtcgcttgatgtccgaagctggcggtgaggtgaaacttacggcaggtgagttcaatcttctcctcgcgtttttagagaaaccccgcgacgttctatcgcgcgagcaacttctcattgccagtcgagtacgcgacgaggaggtttatgacaggagtatagatgttctcattttgaggctgcgccgcaaacttgaggcagatccgtcaagccctcaactgataaaaacagcaagaggtgccggttatttctttgacgcggacgtgcaggtttcgcacggggggacgatggcagcctgagccaattcccagatccccgaggaatcggcgtgagcggtcgcaaaccatccggcccggtacaaatcggcgcggcgctgggtgatgacctggtggagaagttgaaggccgcgcaggccgcccagcggcaacgcatcgaggcagaagcacgccccggtgaatcgtggcaagcggccgctgatcgaatccgcaaagaatcccggcaaccgccggcagccggtgcgccgtcgattaggaagccgcccaagggcgacgagcaaccagattttttcgttccgatgctctatgacgtgggcacccgcgatagtcgcagcatcatggacgtggccgttttccgtctgtcgaagcgtgaccgacgagctggcgaggtgatccgctacgagcttccagacgggcacgtagaggtttccgcagggccggccggcatggccagtgtgtgggattacgacctggtactgatggcggtttcccatctaaccgaatccatgaaccgataccgggaagggaagggagacaagcccggccgcgtgttccgtccacacgttgcggacgtactcaagttctgccggcgagccgatggcggaaagcagaaagacgacctggtagaaacctgcattcggttaaacaccacgcacgttgccatgcagcgtacgaagaaggccaagaacggccgcctggtgacggtatccgagggtgaagccttgattagccgctacaagatcgtaaagagcgaaaccgggcggccggagtacatcgagatcgagctggctgattggatgtaccgcgagatcacagaaggcaagaacccggacgtgctgacggttcaccccgattactttttgatcgatcccggcatcggccgttttctctaccgcctggcacgccgcgccgcaggcaaggcagaagccagatggttgttcaagacgatctacgaacgcagtggcagcgccggagagttcaagaagttctgtttcaccgtgcgcaagctgatcgggtcaaatgacctgccggagtacgatttgaaggaggaggcggggcaggctggcccgatcctagtcatgcgctaccgcaacctgatcgagggcgaagcatccgccggttcctaatgtacggagcagatgctagggcaaattgccctagcaggggaaaaaggtcgaaaaggtctctttcctgtggatagcacgtacattgggaacccaaagccgtacattgggaaccggaacccgtacattgggaacccaaagccgtacattgggaaccggtcacacatgtaagtgactgatataaaagagaaaaaaggcgatttttccgcctaaaactctttaaaacttattaaaactcttaaaacccgcctggcctgtgcataactgtctggccagcgcacagccgaagagctgcaaaaagcgcctacccttcggtcgctgcgctccctacgccccgccgcttcgcgtcggcctatcgcggccgctggccgctcaaaaatggctggcctacggccaggcaatctaccagggcgcggacaagccgcgccgtcgccactcgaccgccggcgctgaggtctgcctcgtgaagaaggtgttgctgactcataccaggcctgaatcgccccatcatccagccagaaagtgagggagccacggttgatgagagctttgttgtaggtggaccagttggtgattttgaacttttgctttgccacggaacggtctgcgttgtcgggaagatgcgtgatctgatccttcaactcagcaaaagttcgatttattcaacaaagccgccgtcccgtcaagtcagcgtaatgctctgccagtgttacaaccaattaaccaattctgattagaaaaactcatcgagcatcaaatgaaactgcaatttattcatatcaggattatcaataccatatttttgaaaaagccgtttctgtaatgaaggagaaaactcaccgaggcagttccataggatggcaagatcctggtatcggtctgcgattccgactcgtccaacatcaatacaacctattaatttcccctcgtcaaaaataaggttatcaagtgagaaatcaccatgagtgacgactgaatccggtgagaatggcaaaagctctgcattaatgaatcggccaacgcgcggggagaggcggtttgcgtattgggcgctcttccgcttcctcgctcactgactcgctgcgctcggtcgttcggctgcggcgagcggtatcagctcactcaaaggcggtaatacggttatccacagaatcaggggataacgcaggaaagaacatgtgagcaaaaggccagcaaaaggccaggaaccgtaaaaaggccgcgttgctggcgtttttccataggctccgcccccctgacgagcatcacaaaaatcgacgctcaagtcagaggtggcgaaacccgacaggactataaagataccaggcgtttccccctggaagctccctcgtgcgctctcctgttccgaccctgccgcttaccggatacctgtccgcctttctcccttcgggaagcgtggcgctttctcatagctcacgctgtaggtatctcagttcggtgtaggtcgttcgctccaagctgggctgtgtgcacgaaccccccgttcagcccgaccgctgcgccttatccggtaactatcgtcttgagtccaacccggtaagacacgacttatcgccactggcagcagccactggtaacaggattagcagagcgaggtatgtaggcggtgctacagagttcttgaagtggtggcctaactacggctacactagaagaacagtatttggtatctgcgctctgctgaagccagttaccttcggaaaaagagttggtagctcttgatccggcaaacaaaccaccgctggtagcggtggtttttttgtttgcaagcagcagattacgcgcagaaaaaaaggatctcaagaagatcctttgatcttttctacggggtctgacgctcagtggaacgaaaactcacgttaagggattttggtcatgagattatcaaaaaggatcttcacctagatccttttgatccggaatta

SEQ ID NO: 52 - DNA, 17528 bp, synthetic construct
  source 1..17528: mol_type = other DNA
attcctgtggttggcatgcacatacaaatggacgaacggataaaccttttcacgcccttttaaatatccgattattctaataaacgctcttttctcttaggtttacccgccaatatatcctgtcaaacactgatagtttaaactggcactagcctaacggtgttgactaactaggccgcttccctaattagctaacccgggggcgcgccgggaccggaattcattatgtggtctaggtaggttctatatataagaaaacttgaaatgttctaaaaaaaaattcaagcccatgcatgattgaagcaaacggtatagcaacggtgttaacctgatctagtgatctcttgcaatccttaacggccacctaccgcaggtagcaaacggcgtccccctcctcgatatctccgcggcgacctctggctttttccgcggaattgcgcggtggggacggattccacgagaccgcgacgcaaccgcctctcgccgctgggccccacaccgctcggtgccgtagcctcacgggactctttctccctcctcccccgttataaattggcttcatcccctccttgcctcatccatccaaatcccagtccccaatcccatcccttcgtaggagaaattcatcgaagctaagcgaatcctcgcgatcctctcaaggtactgcgagttttcgatccccctctcgacccctcgtatgtttgtgtttgtcgtagcgtttgattaggtatgctttccctgtttgtgttcgtcgtagcgtttgattaggtatgctttccctgttcgtgttcatcgtagtgtttgattaggtcgtgtgaggcgatggcctgctcgcgtccttcgatctgtagtcgatttgcgggtcgtggtgtagatctgcgggctgtgatgaagttatttggtgtgatctgctcgcctgattctgcgggttggctcgagtagatatgatggttggaccggttggttcgtttaccgcgctagggttgggctgggatgatgttgcatgcgccgttgcgcgtgatcccgcagcaggacttgcgtttgattgccagatctcgttacgattatgtgatttggtttggactttttagatctgtagcttctgcttatgtgccagatgcgcctactgctcatatgcctgatgataatcataaatggctgtggaactaactagttgattgcggagtcatgtatcagctacaggtgtagggactagctacaggtgtagggacttgcgtctaattgtttggtcctttactcatgttgcaattatgcaatttagtttagattgtttgttccactcatctaggctgtaaaagggacactgcttagattgctgtttaatctttttagtagattatattatattggtaacttattacccctattacatgccatacgtgacttctgctcatgcctgatgataatcatagatcactgtggaattaattagttgattgttgaatcatgtttcatgtacataccacggcacaattgcttagttccttaacaaatgcaaattttactgatccatgtatgatttgcgtggttctctaatgtgaaatactatagctacttgttagtaagaatcaggttcgtatgcttaatgctgtatgtgccttctgctcatgcctgatgataatcatatatcactggaattaattagttgatcgtttaatcatatatcaagtacataccatgccacaatttttagtcacttaacccatgcagattgaactggtccctgcatgttttgctaaattgttctattctgattagaccatatatcatgtatttttttttggtaatggttctcttattttaaatgctatatagttctggtacttgttagaaagatctgcttcatagtttagttgcctatccctcgaattaggatgctgagcagctgatcctatagctttgtttcatgtatcaattcttttgtgttcaacagtcagtttttgttagattcattgtaacttatggtcgcttactcttctggtcctcaatgcttgcagggatcccctaaatagaccatgccgaagaagaagcgcaaggtcgggggcgggggctcaggcgggggcgggagcggcggcgggggctctgggggcggcggcagcggcgggggcggcagcgggggcggcgggtcgatgctgttccaggatttcactcatctgtaccctctctcaaagactgttcggttcgagctcaagcctattgggcggactctggagcacatccacgcgaagaacttcctcagccaggacgaaaccatggccgacatgtaccagaaggtcaaggtcatcctcgacgactaccacagggacttcatcgcggacatgatgggcgaggtgaagctgacgaagctcgccgagttctacgacgtctacctcaagttccgcaagaacccgaaggacgacggcctccagaagcagctcaaggacctgcaggccgtcctgaggaaggagtccgtcaagcccatcggcagcggcggcaagtacaagaccggctacgacaggctgttcggcgccaagctgttcaaggacggcaaggagctcggcgacctggcgaagttcgtgatcgcgcaggagggcgagagctcccccaagctggcccacctggcccacttcgagaagttcagcacgtacttcaccggcttccacgacaacaggaagaacatgtacagcgacgaggacaagcacacggccatcgcctaccgcctcatccacgagaacctgccccgcttcatcgacaacctgcagatcctgacgaccatcaagcagaagcactccgccctgtacgaccagatcatcaacgagctcaccgcgagcggcctcgacgtgtccctcgccagccacctcgacggctaccacaagctcctgacccaggagggcatcaccgcctacaaccgcatcatcggcgaggtgaacggctacaccaacaagcacaaccagatctgccacaagtccgagaggatcgccaagctcaggcccctgcacaagcagatcctcagcgacggcatgggcgtgagcttcctcccgtccaagttcgccgacgactccgagatgtgccaggccgtgaacgagttctacaggcactacaccgacgtgttcgccaaggtgcagtccctgttcgacggcttcgacgaccaccagaaggacggcatctacgtggagcacaagaacctgaacgagctgtccaagcaggccttcggcgacttcgccctcctgggccgcgtgctggacggctactacgtggacgtcgtgaacccggagttcaacgagcgcttcgcgaaggcgaagacggacaacgcgaaggccaagctcaccaaggagaaggacaagttcatcaagggcgtccacagcctcgcgtccctggagcaggcgatcgagcaccacaccgcgcgccacgacgacgagtccgtgcaggccggcaagctcggccagtacttcaagcacggcctggccggcgtcgacaacccgatccagaagatccacaacaaccactccaccatcaagggcttcctggagagggagcgcccggcgggcgagcgcgcgctccccaagatcaagtccggcaagaaccccgagatgacgcagctcaggcagctgaaggagctgctcgacaacgcgctcaacgtggcgcacttcgccaagctgctcacgaccaagaccacgctggacaaccaggacggcaacttctacggcgagttcggcgtcctgtacgacgagctggcgaagatcccgaccctgtacaacaaggtccgcgactacctgagccagaagcccttctccaccgagaagtacaagctcaacttcggcaacccgaccctcctgaacggctgggacctcaacaaggagaaggacaacttcggcgtgatcctccagaaggacggctgctactacctcgccctgctggacaaggcgcacaagaaggtcttcgacaacgccccgaacaccggcaagaacgtgtaccagaagatggtgtacaagctgctccccggccccaacaagatgctgccgaaggtgttcttcgcgaagtccaacctcgactactacaaccccagcgccgagctcctggacaagtacgccaagggcacgcacaagaagggcgacaacttcaacctcaaggactgccacgcgctgatcgacttcttcaaggcgggcatcaacaagcaccccgagtggcagcacttcggcttcaagttcagcccgacctccagctacagggacctcagcgacttctaccgcgaggtggagccccagggctaccaggtgaagttcgtcgacatcaacgccgactacatcgacgagctcgtcgagcagggcaagctctacctgttccagatctacaacaaggacttctccccgaaggcccacggcaagccgaacctccacacgctctacttcaaggccctcttcagcgaggacaacctggccgacccgatctacaagctcaacggcgaggcgcagatcttctaccgcaaggccagcctggacatgaacgaaacgaccatccacagggccggcgaggtcctggagaacaagaacccggacaacccgaagaagaggcagttcgtctacgacatcatcaaggacaagaggtacacccaggacaagttcatgctccacgtcccgatcaccatgaacttcggcgtccagggcatgaccatcaaggagttcaacaagaaggtcaaccagagcatccagcagtacgacgaggtgaacgtcatcggcatcgaccgcggcgagaggcacctgctctacctgacggtcatcaactccaagggcgagatcctcgagcagcgcagcctgaacgacatcatcaacaacttcaacggcatcaggatcaagacggactaccacagcctcctggacaagaaggagaaggagaggttcgaggcccgccagaactggggcgagatcgaaacgatcaaggagctcaagtccggctacctcagccacgtcgtgcaccagatcaaccagctcatgctgaagtacaacgcgatcgtggtcctcgaggacctgaacttcggcttcaagaggggccgcttcaaggtggagaagcagatctaccagaacttcgagaacgccctgatcaagaagctcaaccacctggtcctcaaggacaaggcggacgacgagatcggcagctacaagaacgcgctccagctgaccaacaacttcacggacctcaagtccatcggcaagcagacgggcttcctgttctacgtgccggcgtggaacacctccaagatcgacccggaaaccggcttcgtcgacctgctcaagccgcgctacgagaacatcgcgcagtcccaggcgttcttcggcaagttcgacaagatctgctacaacaccgacaagggctacttcgagttccacatcgactacgcgaagttcaccgacaaggccaagaactccaggcagaagtgggccatctgcagccacggcgacaagcgctacgtgtacgacaagacggcgaaccagaacaagggcgcggccaagggcatcaacgtgaacgacgagctgaagtccctcttcgcgcgctaccacatcaacgacaagcagccgaacctcgtcatggacatctgccagaacaacgacaaggagttccacaagagcctgatgtgcctgctcaagaccctgctcgccctccgctactccaacgcgagctccgacgaggacttcatcctcagccccgtcgcgaacgacgagggcgtgttcttcaactccgccctcgcggacgacacgcagccgcagaacgccgacgcgaacggcgcctaccacatcgccctcaagggcctgtggctgctcaacgagctcaagaactccgacgacctgaacaaggtgaagctcgccattgacaaccagacgtggctgaatttcgctcagaatagggggggcgggggctcaggcgggggcgggagcggcggcgggggctctgggggcggcggcagcggcgggggcggcagcgggggcggcgggtcgccgaagaagaagcgcaaggtgtccggcggcagctccggcggcagcccgaagaagaagcgcaaagtgtgagggacccgatcgttcaaacatttggcaataaagtttcttaagattgaatcctgttgccggtcttgcgatgattatcatataatttctgttgaattacgttaagcatgtaataattaacatgtaatgcatgacgttatttatgagatgggtttttatgattagagtcccgcaattatacatttaatacgcgatagaaaacaaaatatagcgcgcaaactaggataaattatcgcgcgcggtgtcatctatgttactagatcggtaccgaattcattatgtggtctaggtaggttctatatataagaaaacttgaaatgttctaaaaaaaaattcaagcccatgcatgattgaagcaaacggtatagcaacggtgttaacctgatctagtgatctcttgcaatccttaacggccacctaccgcaggtagcaaacggcgtccccctcctcgatatctccgcggcgacctctggctttttccgcggaattgcgcggtggggacggattccacgagaccgcgacgcaaccgcctctcgccgctgggccccacaccgctcggtgccgtagcctcacgggactctttctccctcctcccccgttataaattggcttcatcccctccttgcctcatccatccaaatcccagtccccaatcccatcccttcgtaggagaaattcatcgaagctaagcgaatcctcgcgatcctctcaaggtactgcgagttttcgatccccctctcgacccctcgtatgtttgtgtttgtcgtagcgtttgattaggtatgctttccctgtttgtgttcgtcgtagcgtttgattaggtatgctttccctgttcgtgttcatcgtagtgtttgattaggtcgtgtgaggcgatggcctgctcgcgtccttcgatctgtagtcgatttgcgggtcgtggtgtagatctgcgggctgtgatgaagttatttggtgtgatctgctcgcctgattctgcgggttggctcgagtagatatgatggttggaccggttggttcgtttaccgcgctagggttgggctgggatgatgttgcatgcgccgttgcgcgtgatcccgcagcaggacttgcgtttgattgccagatctcgttacgattatgtgatttggtttggactttttagatctgtagcttctgcttatgtgccagatgcgcctactgctcatatgcctgatgataatcataaatggctgtggaactaactagttgattgcggagtcatgtatcagctacaggtgtagggactagctacaggtgtagggacttgcgtctaattgtttggtcctttactcatgttgcaattatgcaatttagtttagattgtttgttccactcatctaggctgtaaaagggacactgcttagattgctgtttaatctttttagtagattatattatattggtaacttattacccctattacatgccatacgtgacttctgctcatgcctgatgataatcatagatcactgtggaattaattagttgattgttgaatcatgtttcatgtacataccacggcacaattgcttagttccttaacaaatgcaaattttactgatccatgtatgatttgcgtggttctctaatgtgaaatactatagctacttgttagtaagaatcaggttcgtatgcttaatgctgtatgtgccttctgctcatgcctgatgataatcatatatcactggaattaattagttgatcgtttaatcatatatcaagtacataccatgccacaatttttagtcacttaacccatgcagattgaactggtccctgcatgttttgctaaattgttctattctgattagaccatatatcatgtatttttttttggtaatggttctcttattttaaatgctatatagttctggtacttgttagaaagatctgcttcatagtttagttgcctatccctcgaattaggatgctgagcagctgatcctatagctttgtttcatgtatcaattcttttgtgttcaacagtcagtttttgttagattcattgtaacttatggtcgcttactcttctggtcctcaatgcttgcagaagcttgaaattctgatgagtccgtgaggacgaaacgagtaagctcgtcaatttctactgtttgtagatgggaaagaccgaggagaagatctaatttctactgtttgtagatgcaccaaggaaggggaggagatcaatttctactgtttgtagatgtcacagatcacaaacttcaaatgaatttctactgtttgtagatacgcccagaaagcatacgcagtcggccggcatggtcccagcctcctcgctggcgccggctgggcaacatgcttcggcatggcgaatgggacgatcgttcaaacatttggcaataaagtttcttaagattgaatcctgttgccggtcttgcgatgattatcatataatttctgttgaattacgttaagcatgtaataattaacatgtaatgcatgacgttatttatgagatgggtttttatgattagagtcccgcaattatacatttaatacgcgatagaaaacaaaatatagcgcgcaaactaggataaattatcgcgcgcggtgtcatctatgttactagatccctaggctgcagtgcagcgtgacccggtcgtgcccctctctagagataatgagcattgcatgtctaagttataaaaaattaccacatattttttttgtcacacttgtttgaagtgcagtttatctatctttatacatatatttaaactttactctacgaataatataatctatagtactacaataatatcagtgttttagagaatcatataaatgaacagttagacatggtctaaaggacaattgagtattttgacaacaggactctacagttttatctttttagtgtgcatgtgttctcctttttttttgcaaatagcttcacctatataatacttcatccattttattagtacatccatttagggtttagggttaatggtttttatagactaatttttttagtacatctattttattctattttagcctctaaattaagaaaactaaaactctattttagtttttttatttaataatttagatataaaatagaataaaataaagtgactaaaaattaaacaaataccctttaagaaattaaaaaaactaaggaaacatttttcttgtttcgagtagataatgccagcctgttaaacgccgtcgacgagtctaacggacaccaaccagcgaaccagcagcgtcgcgtcgggccaagcgaagcagacggcacggcatctctgtcgctgcctctggacccctctcgagagttccgctccaccgttggacttgctccgctgtcggcatccagaaattgcgtggcggagcggcagacgtgagccggcacggcaggcggcctcctcctcctctcacggcaccggcagctacgggggattcctttcccaccgctccttcgctttcccttcctcgcccgccgtaataaatagacaccccctccacaccctctttccccaacctcgtgttgttcggagcgcacacacacacaaccagatctcccccaaatccacccgtcggcacctccgcttcaaggtacgccgctcgtcctccccccccccccctctctaccttctctagatcggcgttccggtccatggttagggcccggtagttctacttctgttcatgtttgtgttagatccgtgtttgtgttagatccgtgctgctagcgttcgtacacggatgcgacctgtacgtcagacacgttctgattgctaacttgccagtgtttctctttggggaatcctgggatggctctagccgttccgcagacgggatcgatttcatgattttttttgtttcgttgcatagggtttggtttgcccttttcctttatttcaatatatgccgtgcacttgtttgtcgggtcatcttttcatgcttttttttgtcttggttgtgatgatgtggtctggttgggcggtcgttctagatcggagtagaattctgtttcaaactacctggtggatttattaattttggatctgtatgtgtgtgccatacatattcatagttacgaattgaagatgatggatggaaatatcgatctaggataggtatacatgttgatgcgggttttactgatgcatatacagagatgctttttgttcgcttggttgtgatgatgtggtgtggttgggcggtcgttcattcgttctagatcggagtagaatactgtttcaaactacctggtgtatttattaattttggaactgtatgtgtgtgtcatacatcttcatagttacgagtttaagatggatggaaatatcgatctaggataggtatacatgttgatgtgggttttactgatgcatatacatgatggcatatgcagcatctattcatatgctctaaccttgagtacctatctattataataaacaagtatgttttataattattttgatcttgatatacttggatgatggcatatgcagcagctatatgtggatttttttagccctgccttcatacgctatttatttgcttggtactgtttcttttgtcgatgctcaccctgttgtttggtgttacttctgcagggatcaccgatcatgcaaaaactcattaactcagtgcaaaactatgcctggggcagcaaaacggcgttgactgaactttatggtatggaaaatccgtccagccagccgatggccgagctgtggatgggcgcacatccgaaaagcagttcacgagtgcagaatgccgccggagatatcgtttcactgcgtgatgtgattgagagtgataaatcgactctgctcggagaggccgttgccaaacgctttggcgaactgcctttcctgttcaaagtattatgcgcagcacagccactctccattcaggttcatccaaacaaacacaattctgaaatcggttttgccaaagaaaatgccgcaggtatcccgatggatgccgccgagcgtaactataaagatcctaaccacaagccggagctggtttttgcgctgacgcctttccttgcgatgaacgcgtttcgtgaattttccgagattgtctccctactccagccggtcgcaggtgcacatccggcgattgctcactttttacaacagcctgatgccgaacgtttaagcgaactgttcgccagcctgttgaatatgcagggtgaagaaaaatcccgcgcgctggcgattttaaaatcggccctcgatagccagcagggtgaaccgtggcaaacgattcgtttaatttctgaattttacccggaagacagcggtctgttctccccgctattgctgaatgtggtgaaattgaaccctggcgaagcgatgttcctgttcgctgaaacaccgcacgcttacctgcaaggcgtggcgctggaagtgatggcaaactccgataacgtgctgcgtgcgggtctgacgcctaaatacattgatattccggaactggttgccaatgtgaaattcgaagccaaaccggctaaccagttgttgacccagccggtgaaacaaggtgcagaactggacttcccgattccagtggatgattttgccttctcgctgcatgaccttagtgataaagaaaccaccattagccagcagagtgccgccattttgttctgcgtcgaaggcgatgcaacgttgtggaaaggttctcagcagttacagcttaaaccgggtgaatcagcgtttattgccgccaacgaatcaccggtgactgtcaaaggccacggccgtttagcgcgtgtttacaacaagctgtaagagcttactgaaaaaattaacatctcttgctaagctgggagctcgatccgtcgacctgcagatcgttcaaacatttggcaataaagtttcttaagattgaatcctgttgccggtcttgcgatgattatcatataatttctgttgaattacgttaagcatgtaataattaacatgtaatgcatgacgttatttatgagatgggtttttatgattagagtcccgcaattatacatttaatacgcgatagaaaacaaaatatagcgcgcaaactaggataaattatcgcgcgcggtgtcatctatgttactagatccggaccgcctgcaggcccgggggcgcgccctaattagctaacggccaggatcgccgcgtgagcctttagcaactagctagattaattaacgcaatctgttattaagttgtctaagcgtcaatttgtttacaccacaatatatcctgccaccagccagccaacagctccccgaccggcagctcggcacaaaatcaccactcgatacaggcagcccatcagaattaattctcatgtttgacagcttatcatcgactgcacggtgcaccaatgcttctggcgtcaggcagccatcggaagctgtggtatggctgtgcaggtcgtaaatcactgcataattcgtgtcgctcaaggcgcactcccgttctggataatgttttttgcgccgacatcataacggttctggcaaatattctgaaatgagctgttgacaattaatcatccggctcgtataatgtgtggaattgtgagcggataacaatttcacacaggaaacagaccatgagggaagcgttgatcgccgaagtatcgactcaactatcagaggtagttggcgtcatcgagcgccatctcgaaccgacgttgctggccgtacatttgtacggctccgcagtggatggcggcctgaagccacacagtgatattgatttgctggttacggtgaccgtaaggcttgatgaaacaacgcggcgagctttgatcaacgaccttttggaaacttcggcttcccctggagagagcgagattctccgcgctgtagaagtcaccattgttgtgcacgacgacatcattccgtggcgttatccagctaagcgcgaactgcaatttggagaatggcagcgcaatgacattcttgcaggtatcttcgagccagccacgatcgacattgatctggctatcttgctgacaaaagcaagagaacatagcgttgccttggtaggtccagcggcggaggaactctttgatccggttcctgaacaggatctatttgaggcgctaaatgaaaccttaacgctatggaactcgccgcccgactgggctggcgatgagcgaaatgtagtgcttacgttgtcccgcatttggtacagcgcagtaaccggcaaaatcgcgccgaaggatgtcgctgccgactgggcaatggagcgcctgccggcccagtatcagcccgtcatacttgaagctaggcaggcttatcttggacaagaagatcgcttggcctcgcgcgcagatcagttggaagaatttgttcactacgtgaaaggcgagatcaccaaagtagtcggcaaataaagctctagtggatctccgtacccagggatctggctcgcggcggacgcacgacgccggggcgagaccataggcgatctcctaaatcaatagtagctgtaacctcgaagcgtttcacttgtaacaacgattgagaatttttgtcataaaattgaaatacttggttcgcatttttgtcatccgcggtcagccgcaattctgacgaactgcccatttagctggagatgattgtacatccttcacgtgaaaatttctcaagcgctgtgaacaagggttcagattttagattgaaaggtgagccgttgaaacacgttcttcttgtcgatgacgacgtcgctatgcggcatcttattattgaataccttacgatccacgccttcaaagtgaccgcggtagccgacagcacccagttcacaagagtactctcttccgcgacggtcgatgtcgtggttgttgatctagatttaggtcgtgaagatgggctcgagatcgttcgtaatctggcggcaaagtctgatattccaatcataattatcagtggcgaccgccttgaggagacggataaagttgttgcactcgagctaggagcaagtgattttatcgctaagccgttcagtatcagagagtttctagcacgcattcgggttgccttgcgcgtgcgccccaacgttgtccgctccaaagaccgacggtctttttgttttactgactggacacttaatctcaggcaacgtcgcttgatgtccgaagctggcggtgaggtgaaacttacggcaggtgagttcaatcttctcctcgcgtttttagagaaaccccgcgacgttctatcgcgcgagcaacttctcattgccagtcgagtacgcgacgaggaggtttatgacaggagtatagatgttctcattttgaggctgcgccgcaaacttgaggcagatccgtcaagccctcaactgataaaaacagcaagaggtgccggttatttctttgacgcggacgtgcaggtttcgcacggggggacgatggcagcctgagccaattcccagatccccgaggaatcggcgtgagcggtcgcaaaccatccggcccggtacaaatcggcgcggcgctgggtgatgacctggtggagaagttgaaggccgcgcaggccgcccagcggcaacgcatcgaggcagaagcacgccccggtgaatcgtggcaagcggccgctgatcgaatccgcaaagaatcccggcaaccgccggcagccggtgcgccgtcgattaggaagccgcccaagggcgacgagcaaccagattttttcgttccgatgctctatgacgtgggcacccgcgatagtcgcagcatcatggacgtggccgttttccgtctgtcgaagcgtgaccgacgagctggcgaggtgatccgctacgagcttccagacgggcacgtagaggtttccgcagggccggccggcatggccagtgtgtgggattacgacctggtactgatggcggtttcccatctaaccgaatccatgaaccgataccgggaagggaagggagacaagcccggccgcgtgttccgtccacacgttgcggacgtactcaagttctgccggcgagccgatggcggaaagcagaaagacgacctggtagaaacctgcattcggttaaacaccacgcacgttgccatgcagcgtacgaagaaggccaagaacggccgcctggtgacggtatccgagggtgaagccttgattagccgctacaagatcgtaaagagcgaaaccgggcggccggagtacatcgagatcgagctggctgattggatgtaccgcgagatcacagaaggcaagaacccggacgtgctgacggttcaccccgattactttttgatcgatcccggcatcggccgttttctctaccgcctggcacgccgcgccgcaggcaaggcagaagccagatggttgttcaagacgatctacgaacgcagtggcagcgccggagagttcaagaagttctgtttcaccgtgcgcaagctgatcgggtcaaatgacctgccggagtacgatttgaaggaggaggcggggcaggctggcccgatcctagtcatgcgctaccgcaacctgatcgagggcgaagcatccgccggttcctaatgtacggagcagatgctagggcaaattgccctagcaggggaaaaaggtcgaaaaggtctctttcctgtggatagcacgtacattgggaacccaaagccgtacattgggaaccggaacccgtacattgggaacccaaagccgtacattgggaaccggtcacacatgtaagtgactgatataaaagagaaaaaaggcgatttttccgcctaaaactctttaaaacttattaaaactcttaaaacccgcctggcctgtgcataactgtctggccagcgcacagccgaagagctgcaaaaagcgcctacccttcggtcgctgcgctccctacgccccgccgcttcgcgtcggcctatcgcggccgctggccgctcaaaaatggctggcctacggccaggcaatctaccagggcgcggacaagccgcgccgtcgccactcgaccgccggcgctgaggtctgcctcgtgaagaaggtgttgctgactcataccaggcctgaatcgccccatcatccagccagaaagtgagggagccacggttgatgagagctttgttgtaggtggaccagttggtgattttgaacttttgctttgccacggaacggtctgcgttgtcgggaagatgcgtgatctgatccttcaactcagcaaaagttcgatttattcaacaaagccgccgtcccgtcaagtcagcgtaatgctctgccagtgttacaaccaattaaccaattctgattagaaaaactcatcgagcatcaaatgaaactgcaatttattcatatcaggattatcaataccatatttttgaaaaagccgtttctgtaatgaaggagaaaactcaccgaggcagttccataggatggcaagatcctggtatcggtctgcgattccgactcgtccaacatcaatacaacctattaatttcccctcgtcaaaaataaggttatcaagtgagaaatcaccatgagtgacgactgaatccggtgagaatggcaaaagctctgcattaatgaatcggccaacgcgcggggagaggcggtttgcgtattgggcgctcttccgcttcctcgctcactgactcgctgcgctcggtcgttcggctgcggcgagcggtatcagctcactcaaaggcggtaatacggttatccacagaatcaggggataacgcaggaaagaacatgtgagcaaaaggccagcaaaaggccaggaaccgtaaaaaggccgcgttgctggcgtttttccataggctccgcccccctgacgagcatcacaaaaatcgacgctcaagtcagaggtggcgaaacccgacaggactataaagataccaggcgtttccccctggaagctccctcgtgcgctctcctgttccgaccctgccgcttaccggatacctgtccgcctttctcccttcgggaagcgtggcgctttctcatagctcacgctgtaggtatctcagttcggtgtaggtcgttcgctccaagctgggctgtgtgcacgaaccccccgttcagcccgaccgctgcgccttatccggtaactatcgtcttgagtccaacccggtaagacacgacttatcgccactggcagcagccactggtaacaggattagcagagcgaggtatgtaggcggtgctacagagttcttgaagtggtggcctaactacggctacactagaagaacagtatttggtatctgcgctctgctgaagccagttaccttcggaaaaagagttggtagctcttgatccggcaaacaaaccaccgctggtagcggtggtttttttgtttgcaagcagcagattacgcgcagaaaaaaaggatctcaagaagatcctttgatcttttctacggggtctgacgctcagtggaacgaaaactcacgttaagggattttggtcatgagattatcaaaaaggatcttcacctagatccttttgatccggaatta

SEQ ID NO: 53 - DNA, 17531 bp, synthetic construct
  source 1..17531: mol_type = other DNA
attcctgtggttggcatgcacatacaaatggacgaacggataaaccttttcacgcccttttaaatatccgattattctaataaacgctcttttctcttaggtttacccgccaatatatcctgtcaaacactgatagtttaaactggcactagcctaacggtgttgactaactaggccgcttccctaattagctaacccgggggcgcgccgggaccggaattcattatgtggtctaggtaggttctatatataagaaaacttgaaatgttctaaaaaaaaattcaagcccatgcatgattgaagcaaacggtatagcaacggtgttaacctgatctagtgatctcttgcaatccttaacggccacctaccgcaggtagcaaacggcgtccccctcctcgatatctccgcggcgacctctggctttttccgcggaattgcgcggtggggacggattccacgagaccgcgacgcaaccgcctctcgccgctgggccccacaccgctcggtgccgtagcctcacgggactctttctccctcctcccccgttataaattggcttcatcccctccttgcctcatccatccaaatcccagtccccaatcccatcccttcgtaggagaaattcatcgaagctaagcgaatcctcgcgatcctctcaaggtactgcgagttttcgatccccctctcgacccctcgtatgtttgtgtttgtcgtagcgtttgattaggtatgctttccctgtttgtgttcgtcgtagcgtttgattaggtatgctttccctgttcgtgttcatcgtagtgtttgattaggtcgtgtgaggcgatggcctgctcgcgtccttcgatctgtagtcgatttgcgggtcgtggtgtagatctgcgggctgtgatgaagttatttggtgtgatctgctcgcctgattctgcgggttggctcgagtagatatgatggttggaccggttggttcgtttaccgcgctagggttgggctgggatgatgttgcatgcgccgttgcgcgtgatcccgcagcaggacttgcgtttgattgccagatctcgttacgattatgtgatttggtttggactttttagatctgtagcttctgcttatgtgccagatgcgcctactgctcatatgcctgatgataatcataaatggctgtggaactaactagttgattgcggagtcatgtatcagctacaggtgtagggactagctacaggtgtagggacttgcgtctaattgtttggtcctttactcatgttgcaattatgcaatttagtttagattgtttgttccactcatctaggctgtaaaagggacactgcttagattgctgtttaatctttttagtagattatattatattggtaacttattacccctattacatgccatacgtgacttctgctcatgcctgatgataatcatagatcactgtggaattaattagttgattgttgaatcatgtttcatgtacataccacggcacaattgcttagttccttaacaaatgcaaattttactgatccatgtatgatttgcgtggttctctaatgtgaaatactatagctacttgttagtaagaatcaggttcgtatgcttaatgctgtatgtgccttctgctcatgcctgatgataatcatatatcactggaattaattagttgatcgtttaatcatatatcaagtacataccatgccacaatttttagtcacttaacccatgcagattgaactggtccctgcatgttttgctaaattgttctattctgattagaccatatatcatgtatttttttttggtaatggttctcttattttaaatgctatatagttctggtacttgttagaaagatctgcttcatagtttagttgcctatccctcgaattaggatgctgagcagctgatcctatagctttgtttcatgtatcaattcttttgtgttcaacagtcagtttttgttagattcattgtaacttatggtcgcttactcttctggtcctcaatgcttgcagggatcccctaaatagaccatgccgaagaagaagcgcaaggtcgggggcgggggctcaggcgggggcgggagcggcggcgggggctctgggggcggcggcagcggcgggggcggcagcgggggcggcgggtcgatgctgttccaggatttcactcatctgtaccctctctcaaagactgttcggttcgagctcaagcctattgggcggactctggagcacatccacgcgaagaacttcctcagccaggacgaaaccatggccgacatgtaccagaaggtcaaggtcatcctcgacgactaccacagggacttcatcgcggacatgatgggcgaggtgaagctgacgaagctcgccgagttctacgacgtctacctcaagttccgcaagaacccgaaggacgacggcctccagaagcagctcaaggacctgcaggccgtcctgaggaaggagtccgtcaagcccatcggcagcggcggcaagtacaagaccggctacgacaggctgttcggcgccaagctgttcaaggacggcaaggagctcggcgacctggcgaagttcgtgatcgcgcaggagggcgagagctcccccaagctggcccacctggcccacttcgagaagttcagcacgtacttcaccggcttccacgacaacaggaagaacatgtacagcgacgaggacaagcacacggccatcgcctaccgcctcatccacgagaacctgccccgcttcatcgacaacctgcagatcctgacgaccatcaagcagaagcactccgccctgtacgaccagatcatcaacgagctcaccgcgagcggcctcgacgtgtccctcgccagccacctcgacggctaccacaagctcctgacccaggagggcatcaccgcctacaaccgcatcatcggcgaggtgaacggctacaccaacaagcacaaccagatctgccacaagtccgagaggatcgccaagctcaggcccctgcacaagcagatcctcagcgacggcatgggcgtgagcttcctcccgtccaagttcgccgacgactccgagatgtgccaggccgtgaacgagttctacaggcactacaccgacgtgttcgccaaggtgcagtccctgttcgacggcttcgacgaccaccagaaggacggcatctacgtggagcacaagaacctgaacgagctgtccaagcaggccttcggcgacttcgccctcctgggccgcgtgctggacggctactacgtggacgtcgtgaacccggagttcaacgagcgcttcgcgaaggcgaagacggacaacgcgaaggccaagctcaccaaggagaaggacaagttcatcaagggcgtccacagcctcgcgtccctggagcaggcgatcgagcaccacaccgcgcgccacgacgacgagtccgtgcaggccggcaagctcggccagtacttcaagcacggcctggccggcgtcgacaacccgatccagaagatccacaacaaccactccaccatcaagggcttcctggagagggagcgcccggcgggcgagcgcgcgctccccaagatcaagtccggcaagaaccccgagatgacgcagctcaggcagctgaaggagctgctcgacaacgcgctcaacgtggcgcacttcgccaagctgctcacgaccaagaccacgctggacaaccaggacggcaacttctacggcgagttcggcgtcctgtacgacgagctggcgaagatcccgaccctgtacaacaaggtccgcgactacctgagccagaagcccttctccaccgagaagtacaagctcaacttcggcaacccgaccctcctgaacggctgggacctcaacaaggagaaggacaacttcggcgtgatcctccagaaggacggctgctactacctcgccctgctggacaaggcgcacaagaaggtcttcgacaacgccccgaacaccggcaagaacgtgtaccagaagatggtgtacaagctgctccccggccccaacaagatgctgccgaaggtgttcttcgcgaagtccaacctcgactactacaaccccagcgccgagctcctggacaagtacgccaagggcacgcacaagaagggcgacaacttcaacctcaaggactgccacgcgctgatcgacttcttcaaggcgggcatcaacaagcaccccgagtggcagcacttcggcttcaagttcagcccgacctccagctacagggacctcagcgacttctaccgcgaggtggagccccagggctaccaggtgaagttcgtcgacatcaacgccgactacatcgacgagctcgtcgagcagggcaagctctacctgttccagatctacaacaaggacttctccccgaaggcccacggcaagccgaacctccacacgctctacttcaaggccctcttcagcgaggacaacctggccgacccgatctacaagctcaacggcgaggcgcagatcttctaccgcaaggccagcctggacatgaacgaaacgaccatccacagggccggcgaggtcctggagaacaagaacccggacaacccgaagaagaggcagttcgtctacgacatcatcaaggacaagaggtacacccaggacaagttcatgctccacgtcccgatcaccatgaacttcggcgtccagggcatgaccatcaaggagttcaacaagaaggtcaaccagagcatccagcagtacgacgaggtgaacgtcatcggcatcgaccgcggcgagaggcacctgctctacctgacggtcatcaactccaagggcgagatcctcgagcagcgcagcctgaacgacatcacgaccgcgagcgccaacggcacgcaggtcaccacgccgtaccagaagaagctggacaacagggagaaggagagggtggccgcccgccaggcctggggcgagatcgaaacgatcaaggagctcaagtccggctacctcagccacgtcgtgcaccagatcaaccagctcatgctgaagtacaacgcgatcgtggtcctcgaggacctgaacttcggcttcaagaggggccgcttcaaggtggagaagcagatctaccagaacttcgagaacgccctgatcaagaagctcaaccacctggtcctcaaggacaaggcggacgacgagatcggcagctacaagaacgcgctccagctgaccaacaacttcacggacctcaagtccatcggcaagcagacgggcttcctgttctacgtgccggcgtggaacacctccaagatcgacccggaaaccggcttcgtcgacctgctcaagccgcgctacgagaacatcgcgcagtcccaggcgttcttcggcaagttcgacaagatctgctacaacaccgacaagggctacttcgagttccacatcgactacgcgaagttcaccgacaaggccaagaactccaggcagaagtgggccatctgcagccacggcgacaagcgctacgtgtacgacaagacggcgaaccagaacaagggcgcggccaagggcatcaacgtgaacgacgagctgaagtccctcttcgcgcgctaccacatcaacgacaagcagccgaacctcgtcatggacatctgccagaacaacgacaaggagttccacaagagcctgatgtgcctgctcaagaccctgctcgccctccgctactccaacgcgagctccgacgaggacttcatcctcagccccgtcgcgaacgacgagggcgtgttcttcaactccgccctcgcggacgacacgcagccgcagaacgccgacgcgaacggcgcctaccacatcgccctcaagggcctgtggctgctcaacgagctcaagaactccgacgacctgaacaaggtgaagctcgccattgacaaccagacgtggctgaatttcgctcagaatagggggggcgggggctcaggcgggggcgggagcggcggcgggggctctgggggcggcggcagcggcgggggcggcagcgggggcggcgggtcgccgaagaagaagcgcaaggtgtccggcggcagctccggcggcagcccgaagaagaagcgcaaagtgtgagggacccgatcgttcaaacatttggcaataaagtttcttaagattgaatcctgttgccggtcttgcgatgattatcatataatttctgttgaattacgttaagcatgtaataattaacatgtaatgcatgacgttatttatgagatgggtttttatgattagagtcccgcaattatacatttaatacgcgatagaaaacaaaatatagcgcgcaaactaggataaattatcgcgcgcggtgtcatctatgttactagatcggtaccgaattcattatgtggtctaggtaggttctatatataagaaaacttgaaatgttctaaaaaaaaattcaagcccatgcatgattgaagcaaacggtatagcaacggtgttaacctgatctagtgatctcttgcaatccttaacggccacctaccgcaggtagcaaacggcgtccccctcctcgatatctccgcggcgacctctggctttttccgcggaattgcgcggtggggacggattccacgagaccgcgacgcaaccgcctctcgccgctgggccccacaccgctcggtgccgtagcctcacgggactctttctccctcctcccccgttataaattggcttcatcccctccttgcctcatccatccaaatcccagtccccaatcccatcccttcgtaggagaaattcatcgaagctaagcgaatcctcgcgatcctctcaaggtactgcgagttttcgatccccctctcgacccctcgtatgtttgtgtttgtcgtagcgtttgattaggtatgctttccctgtttgtgttcgtcgtagcgtttgattaggtatgctttccctgttcgtgttcatcgtagtgtttgattaggtcgtgtgaggcgatggcctgctcgcgtccttcgatctgtagtcgatttgcgggtcgtggtgtagatctgcgggctgtgatgaagttatttggtgtgatctgctcgcctgattctgcgggttggctcgagtagatatgatggttggaccggttggttcgtttaccgcgctagggttgggctgggatgatgttgcatgcgccgttgcgcgtgatcccgcagcaggacttgcgtttgattgccagatctcgttacgattatgtgatttggtttggactttttagatctgtagcttctgcttatgtgccagatgcgcctactgctcatatgcctgatgataatcataaatggctgtggaactaactagttgattgcggagtcatgtatcagctacaggtgtagggactagctacaggtgtagggacttgcgtctaattgtttggtcctttactcatgttgcaattatgcaatttagtttagattgtttgttccactcatctaggctgtaaaagggacactgcttagattgctgtttaatctttttagtagattatattatattggtaacttattacccctattacatgccatacgtgacttctgctcatgcctgatgataatcatagatcactgtggaattaattagttgattgttgaatcatgtttcatgtacataccacggcacaattgcttagttccttaacaaatgcaaattttactgatccatgtatgatttgcgtggttctctaatgtgaaatactatagctacttgttagtaagaatcaggttcgtatgcttaatgctgtatgtgccttctgctcatgcctgatgataatcatatatcactggaattaattagttgatcgtttaatcatatatcaagtacataccatgccacaatttttagtcacttaacccatgcagattgaactggtccctgcatgttttgctaaattgttctattctgattagaccatatatcatgtatttttttttggtaatggttctcttattttaaatgctatatagttctggtacttgttagaaagatctgcttcatagtttagttgcctatccctcgaattaggatgctgagcagctgatcctatagctttgtttcatgtatcaattcttttgtgttcaacagtcagtttttgttagattcattgtaacttatggtcgcttactcttctggtcctcaatgcttgcagaagcttgaaattctgatgagtccgtgaggacgaaacgagtaagctcgtcaatttctactgtttgtagatgggaaagaccgaggagaagatctaatttctactgtttgtagatgcaccaaggaaggggaggagatcaatttctactgtttgtagatgtcacagatcacaaacttcaaatgaatttctactgtttgtagatacgcccagaaagcatacgcagtcggccggcatggtcccagcctcctcgctggcgccggctgggcaacatgcttcggcatggcgaatgggacgatcgttcaaacatttggcaataaagtttcttaagattgaatcctgttgccggtcttgcgatgattatcatataatttctgttgaattacgttaagcatgtaataattaacatgtaatgcatgacgttatttatgagatgggtttttatgattagagtcccgcaattatacatttaatacgcgatagaaaacaaaatatagcgcgcaaactaggataaattatcgcgcgcggtgtcatctatgttactagatccctaggctgcagtgcagcgtgacccggtcgtgcccctctctagagataatgagcattgcatgtctaagttataaaaaattaccacatattttttttgtcacacttgtttgaagtgcagtttatctatctttatacatatatttaaactttactctacgaataatataatctatagtactacaataatatcagtgttttagagaatcatataaatgaacagttagacatggtctaaaggacaattgagtattttgacaacaggactctacagttttatctttttagtgtgcatgtgttctcctttttttttgcaaatagcttcacctatataatacttcatccattttattagtacatccatttagggtttagggttaatggtttttatagactaatttttttagtacatctattttattctattttagcctctaaattaagaaaactaaaactctattttagtttttttatttaataatttagatataaaatagaataaaataaagtgactaaaaattaaacaaataccctttaagaaattaaaaaaactaaggaaacatttttcttgtttcgagtagataatgccagcctgttaaacgccgtcgacgagtctaacggacaccaaccagcgaaccagcagcgtcgcgtcgggccaagcgaagcagacggcacggcatctctgtcgctgcctctggacccctctcgagagttccgctccaccgttggacttgctccgctgtcggcatccagaaattgcgtggcggagcggcagacgtgagccggcacggcaggcggcctcctcctcctctcacggcaccggcagctacgggggattcctttcccaccgctccttcgctttcccttcctcgcccgccgtaataaatagacaccccctccacaccctctttccccaacctcgtgttgttcggagcgcacacacacacaaccagatctcccccaaatccacccgtcggcacctccgcttcaaggtacgccgctcgtcctccccccccccccctctctaccttctctagatcggcgttccggtccatggttagggcccggtagttctacttctgttcatgtttgtgttagatccgtgtttgtgttagatccgtgctgctagcgttcgtacacggatgcgacctgtacgtcagacacgttctgattgctaacttgccagtgtttctctttggggaatcctgggatggctctagccgttccgcagacgggatcgatttcatgattttttttgtttcgttgcatagggtttggtttgcccttttcctttatttcaatatatgccgtgcacttgtttgtcgggtcatcttttcatgcttttttttgtcttggttgtgatgatgtggtctggttgggcggtcgttctagatcggagtagaattctgtttcaaactacctggtggatttattaattttggatctgtatgtgtgtgccatacatattcatagttacgaattgaagatgatggatggaaatatcgatctaggataggtatacatgttgatgcgggttttactgatgcatatacagagatgctttttgttcgcttggttgtgatgatgtggtgtggttgggcggtcgttcattcgttctagatcggagtagaatactgtttcaaactacctggtgtatttattaattttggaactgtatgtgtgtgtcatacatcttcatagttacgagtttaagatggatggaaatatcgatctaggataggtatacatgttgatgtgggttttactgatgcatatacatgatggcatatgcagcatctattcatatgctctaaccttgagtacctatctattataataaacaagtatgttttataattattttgatcttgatatacttggatgatggcatatgcagcagctatatgtggatttttttagccctgccttcatacgctatttatttgcttggtactgtttcttttgtcgatgctcaccctgttgtttggtgttacttctgcagggatcaccgatcatgcaaaaactcattaactcagtgcaaaactatgcctggggcagcaaaacggcgttgactgaactttatggtatggaaaatccgtccagccagccgatggccgagctgtggatgggcgcacatccgaaaagcagttcacgagtgcagaatgccgccggagatatcgtttcactgcgtgatgtgattgagagtgataaatcgactctgctcggagaggccgttgccaaacgctttggcgaactgcctttcctgttcaaagtattatgcgcagcacagccactctccattcaggttcatccaaacaaacacaattctgaaatcggttttgccaaagaaaatgccgcaggtatcccgatggatgccgccgagcgtaactataaagatcctaaccacaagccggagctggtttttgcgctgacgcctttccttgcgatgaacgcgtttcgtgaattttccgagattgtctccctactccagccggtcgcaggtgcacatccggcgattgctcactttttacaacagcctgatgccgaacgtttaagcgaactgttcgccagcctgttgaatatgcagggtgaagaaaaatcccgcgcgctggcgattttaaaatcggccctcgatagccagcagggtgaaccgtggcaaacgattcgtttaatttctgaattttacccggaagacagcggtctgttctccccgctattgctgaatgtggtgaaattgaaccctggcgaagcgatgttcctgttcgctgaaacaccgcacgcttacctgcaaggcgtggcgctggaagtgatggcaaactccgataacgtgctgcgtgcgggtctgacgcctaaatacattgatattccggaactggttgccaatgtgaaattcgaagccaaaccggctaaccagttgttgacccagccggtgaaacaaggtgcagaactggacttcccgattccagtggatgattttgccttctcgctgcatgaccttagtgataaagaaaccaccattagccagcagagtgccgccattttgttctgcgtcgaaggcgatgcaacgttgtggaaaggttctcagcagttacagcttaaaccgggtgaatcagcgtttattgccgccaacgaatcaccggtgactgtcaaaggccacggccgtttagcgcgtgtttacaacaagctgtaagagcttactgaaaaaattaacatctcttgctaagctgggagctcgatccgtcgacctgcagatcgttcaaacatttggcaataaagtttcttaagattgaatcctgttgccggtcttgcgatgattatcatataatttctgttgaattacgttaagcatgtaataattaacatgtaatgcatgacgttatttatgagatgggtttttatgattagagtcccgcaattatacatttaatacgcgatagaaaacaaaatatagcgcgcaaactaggataaattatcgcgcgcggtgtcatctatgttactagatccggaccgcctgcaggcccgggggcgcgccctaattagctaacggccaggatcgccgcgtgagcctttagcaactagctagattaattaacgcaatctgttattaagttgtctaagcgtcaatttgtttacaccacaatatatcctgccaccagccagccaacagctccccgaccggcagctcggcacaaaatcaccactcgatacaggcagcccatcagaattaattctcatgtttgacagcttatcatcgactgcacggtgcaccaatgcttctggcgtcaggcagccatcggaagctgtggtatggctgtgcaggtcgtaaatcactgcataattcgtgtcgctcaaggcgcactcccgttctggataatgttttttgcgccgacatcataacggttctggcaaatattctgaaatgagctgttgacaattaatcatccggctcgtataatgtgtggaattgtgagcggataacaatttcacacaggaaacagaccatgagggaagcgttgatcgccgaagtatcgactcaactatcagaggtagttggcgtcatcgagcgccatctcgaaccgacgttgctggccgtacatttgtacggctccgcagtggatggcggcctgaagccacacagtgatattgatttgctggttacggtgaccgtaaggcttgatgaaacaacgcggcgagctttgatcaacgaccttttggaaacttcggcttcccctggagagagcgagattctccgcgctgtagaagtcaccattgttgtgcacgacgacatcattccgtggcgttatccagctaagcgcgaactgcaatttggagaatggcagcgcaatgacattcttgcaggtatcttcgagccagccacgatcgacattgatctggctatcttgctgacaaaagcaagagaacatagcgttgccttggtaggtccagcggcggaggaactctttgatccggttcctgaacaggatctatttgaggcgctaaatgaaaccttaacgctatggaactcgccgcccgactgggctggcgatgagcgaaatgtagtgcttacgttgtcccgcatttggtacagcgcagtaaccggcaaaatcgcgccgaaggatgtcgctgccgactgggcaatggagcgcctgccggcccagtatcagcccgtcatacttgaagctaggcaggcttatcttggacaagaagatcgcttggcctcgcgcgcagatcagttggaagaatttgttcactacgtgaaaggcgagatcaccaaagtagtcggcaaataaagctctagtggatctccgtacccagggatctggctcgcggcggacgcacgacgccggggcgagaccataggcgatctcctaaatcaatagtagctgtaacctcgaagcgtttcacttgtaacaacgattgagaatttttgtcataaaattgaaatacttggttcgcatttttgtcatccgcggtcagccgcaattctgacgaactgcccatttagctggagatgattgtacatccttcacgtgaaaatttctcaagcgctgtgaacaagggttcagattttagattgaaaggtgagccgttgaaacacgttcttcttgtcgatgacgacgtcgctatgcggcatcttattattgaataccttacgatccacgccttcaaagtgaccgcggtagccgacagcacccagttcacaagagtactctcttccgcgacggtcgatgtcgtggttgttgatctagatttaggtcgtgaagatgggctcgagatcgttcgtaatctggcggcaaagtctgatattccaatcataattatcagtggcgaccgccttgaggagacggataaagttgttgcactcgagctaggagcaagtgattttatcgctaagccgttcagtatcagagagtttctagcacgcattcgggttgccttgcgcgtgcgccccaacgttgtccgctccaaagaccgacggtctttttgttttactgactggacacttaatctcaggcaacgtcgcttgatgtccgaagctggcggtgaggtgaaacttacggcaggtgagttcaatcttctcctcgcgtttttagagaaaccccgcgacgttctatcgcgcgagcaacttctcattgccagtcgagtacgcgacgaggaggtttatgacaggagtatagatgttctcattttgaggctgcgccgcaaacttgaggcagatccgtcaagccctcaactgataaaaacagcaagaggtgccggttatttctttgacgcggacgtgcaggtttcgcacggggggacgatggcagcctgagccaattcccagatccccgaggaatcggcgtgagcggtcgcaaaccatccggcccggtacaaatcggcgcggcgctgggtgatgacctggtggagaagttgaaggccgcgcaggccgcccagcggcaacgcatcgaggcagaagcacgccccggtgaatcgtggcaagcggccgctgatcgaatccgcaaagaatcccggcaaccgccggcagccggtgcgccgtcgattaggaagccgcccaagggcgacgagcaaccagattttttcgttccgatgctctatgacgtgggcacccgcgatagtcgcagcatcatggacgtggccgttttccgtctgtcgaagcgtgaccgacgagctggcgaggtgatccgctacgagcttccagacgggcacgtagaggtttccgcagggccggccggcatggccagtgtgtgggattacgacctggtactgatggcggtttcccatctaaccgaatccatgaaccgataccgggaagggaagggagacaagcccggccgcgtgttccgtccacacgttgcggacgtactcaagttctgccggcgagccgatggcggaaagcagaaagacgacctggtagaaacctgcattcggttaaacaccacgcacgttgccatgcagcgtacgaagaaggccaagaacggccgcctggtgacggtatccgagggtgaagccttgattagccgctacaagatcgtaaagagcgaaaccgggcggccggagtacatcgagatcgagctggctgattggatgtaccgcgagatcacagaaggcaagaacccggacgtgctgacggttcaccccgattactttttgatcgatcccggcatcggccgttttctctaccgcctggcacgccgcgccgcaggcaaggcagaagccagatggttgttcaagacgatctacgaacgcagtggcagcgccggagagttcaagaagttctgtttcaccgtgcgcaagctgatcgggtcaaatgacctgccggagtacgatttgaaggaggaggcggggcaggctggcccgatcctagtcatgcgctaccgcaacctgatcgagggcgaagcatccgccggttcctaatgtacggagcagatgctagggcaaattgccctagcaggggaaaaaggtcgaaaaggtctctttcctgtggatagcacgtacattgggaacccaaagccgtacattgggaaccggaacccgtacattgggaacccaaagccgtacattgggaaccggtcacacatgtaagtgactgatataaaagagaaaaaaggcgatttttccgcctaaaactctttaaaacttattaaaactcttaaaacccgcctggcctgtgcataactgtctggccagcgcacagccgaagagctgcaaaaagcgcctacccttcggtcgctgcgctccctacgccccgccgcttcgcgtcggcctatcgcggccgctggccgctcaaaaatggctggcctacggccaggcaatctaccagggcgcggacaagccgcgccgtcgccactcgaccgccggcgctgaggtctgcctcgtgaagaaggtgttgctgactcataccaggcctgaatcgccccatcatccagccagaaagtgagggagccacggttgatgagagctttgttgtaggtggaccagttggtgattttgaacttttgctttgccacggaacggtctgcgttgtcgggaagatgcgtgatctgatccttcaactcagcaaaagttcgatttattcaacaaagccgccgtcccgtcaagtcagcgtaatgctctgccagtgttacaaccaattaaccaattctgattagaaaaactcatcgagcatcaaatgaaactgcaatttattcatatcaggattatcaataccatatttttgaaaaagccgtttctgtaatgaaggagaaaactcaccgaggcagttccataggatggcaagatcctggtatcggtctgcgattccgactcgtccaacatcaatacaacctattaatttcccctcgtcaaaaataaggttatcaagtgagaaatcaccatgagtgacgactgaatccggtgagaatggcaaaagctctgcattaatgaatcggccaacgcgcggggagaggcggtttgcgtattgggcgctcttccgcttcctcgctcactgactcgctgcgctcggtcgttcggctgcggcgagcggtatcagctcactcaaaggcggtaatacggttatccacagaatcaggggataacgcaggaaagaacatgtgagcaaaaggccagcaaaaggccaggaaccgtaaaaaggccgcgttgctggcgtttttccataggctccgcccccctgacgagcatcacaaaaatcgacgctcaagtcagaggtggcgaaacccgacaggactataaagataccaggcgtttccccctggaagctccctcgtgcgctctcctgttccgaccctgccgcttaccggatacctgtccgcctttctcccttcgggaagcgtggcgctttctcatagctcacgctgtaggtatctcagttcggtgtaggtcgttcgctccaagctgggctgtgtgcacgaaccccccgttcagcccgaccgctgcgccttatccggtaactatcgtcttgagtccaacccggtaagacacgacttatcgccactggcagcagccactggtaacaggattagcagagcgaggtatgtaggcggtgctacagagttcttgaagtggtggcctaactacggctacactagaagaacagtatttggtatctgcgctctgctgaagccagttaccttcggaaaaagagttggtagctcttgatccggcaaacaaaccaccgctggtagcggtggtttttttgtttgcaagcagcagattacgcgcagaaaaaaaggatctcaagaagatcctttgatcttttctacggggtctgacgctcagtggaacgaaaactcacgttaagggattttggtcatgagattatcaaaaaggatcttcacctagatccttttgatccggaatta

SEQ ID NO: 54 - DNA, 17504 bp, synthetic construct
  source 1..17504: mol_type = other DNA
attcctgtggttggcatgcacatacaaatggacgaacggataaaccttttcacgcccttttaaatatccgattattctaataaacgctcttttctcttaggtttacccgccaatatatcctgtcaaacactgatagtttaaactggcactagcctaacggtgttgactaactaggccgcttccctaattagctaacccgggggcgcgccgggaccggaattcattatgtggtctaggtaggttctatatataagaaaacttgaaatgttctaaaaaaaaattcaagcccatgcatgattgaagcaaacggtatagcaacggtgttaacctgatctagtgatctcttgcaatccttaacggccacctaccgcaggtagcaaacggcgtccccctcctcgatatctccgcggcgacctctggctttttccgcggaattgcgcggtggggacggattccacgagaccgcgacgcaaccgcctctcgccgctgggccccacaccgctcggtgccgtagcctcacgggactctttctccctcctcccccgttataaattggcttcatcccctccttgcctcatccatccaaatcccagtccccaatcccatcccttcgtaggagaaattcatcgaagctaagcgaatcctcgcgatcctctcaaggtactgcgagttttcgatccccctctcgacccctcgtatgtttgtgtttgtcgtagcgtttgattaggtatgctttccctgtttgtgttcgtcgtagcgtttgattaggtatgctttccctgttcgtgttcatcgtagtgtttgattaggtcgtgtgaggcgatggcctgctcgcgtccttcgatctgtagtcgatttgcgggtcgtggtgtagatctgcgggctgtgatgaagttatttggtgtgatctgctcgcctgattctgcgggttggctcgagtagatatgatggttggaccggttggttcgtttaccgcgctagggttgggctgggatgatgttgcatgcgccgttgcgcgtgatcccgcagcaggacttgcgtttgattgccagatctcgttacgattatgtgatttggtttggactttttagatctgtagcttctgcttatgtgccagatgcgcctactgctcatatgcctgatgataatcataaatggctgtggaactaactagttgattgcggagtcatgtatcagctacaggtgtagggactagctacaggtgtagggacttgcgtctaattgtttggtcctttactcatgttgcaattatgcaatttagtttagattgtttgttccactcatctaggctgtaaaagggacactgcttagattgctgtttaatctttttagtagattatattatattggtaacttattacccctattacatgccatacgtgacttctgctcatgcctgatgataatcatagatcactgtggaattaattagttgattgttgaatcatgtttcatgtacataccacggcacaattgcttagttccttaacaaatgcaaattttactgatccatgtatgatttgcgtggttctctaatgtgaaatactatagctacttgttagtaagaatcaggttcgtatgcttaatgctgtatgtgccttctgctcatgcctgatgataatcatatatcactggaattaattagttgatcgtttaatcatatatcaagtacataccatgccacaatttttagtcacttaacccatgcagattgaactggtccctgcatgttttgctaaattgttctattctgattagaccatatatcatgtatttttttttggtaatggttctcttattttaaatgctatatagttctggtacttgttagaaagatctgcttcatagtttagttgcctatccctcgaattaggatgctgagcagctgatcctatagctttgtttcatgtatcaattcttttgtgttcaacagtcagtttttgttagattcattgtaacttatggtcgcttactcttctggtcctcaatgcttgcagggatcccctaaatagaccatgccgaagaagaagcgcaaggtcgggggcgggggctcaggcgggggcgggagcggcggcgggggctctgggggcggcggcagcggcgggggcggcagcgggggcggcgggtcgatgctgttccaggatttcactcatctgtaccctctctcaaagactgttcggttcgagctcaagcctattgggcggactctggagcacatccacgcgaagaacttcctcagccaggacgaaaccatggccgacatgtaccagaaggtcaaggtcatcctcgacgactaccacagggacttcatcgcggacatgatgggcgaggtgaagctgacgaagctcgccgagttctacgacgtctacctcaagttccgcaagaacccgaaggacgacggcctccagaagcagctcaaggacctgcaggccgtcctgaggaaggagtccgtcaagcccatcggcagcggcggcaagtacaagaccggctacgacaggctgttcggcgccaagctgttcaaggacggcaaggagctcggcgacctggcgaagttcgtgatcgcgcaggagggcgagagctcccccaagctggcccacctggcccacttcgagaagttcagcacgtacttcaccggcttccacgacaacaggaagaacatgtacagcgacgaggacaagcacacggccatcgcctaccgcctcatccacgagaacctgccccgcttcatcgacaacctgcagatcctgacgaccatcaagcagaagcactccgccctgtacgaccagatcatcaacgagctcaccgcgagcggcctcgacgtgtccctcgccagccacctcgacggctaccacaagctcctgacccaggagggcatcaccgcctacaaccgcatcatcggcgaggtgaacggctacaccaacaagcacaaccagatctgccacaagtccgagaggatcgccaagctcaggcccctgcacaagcagatcctcagcgacggcatgggcgtgagcttcctcccgtccaagttcgccgacgactccgagatgtgccaggccgtgaacgagttctacaggcactacaccgacgtgttcgccaaggtgcagtccctgttcgacggcttcgacgaccaccagaaggacggcatctacgtggagcacaagaacctgaacgagctgtccaagcaggccttcggcgacttcgccctcctgggccgcgtgctggacggctactacgtggacgtcgtgaacccggagttcaacgagcgcttcgcgaaggcgaagacggacaacgcgaaggccaagctcaccaaggagaaggacaagttcatcaagggcgtccacagcctcgcgtccctggagcaggcgatcgagcaccacaccgcgcgccacgacgacgagtccgtgcaggccggcaagctcggccagtacttcaagcacggcctggccggcgtcgacaacccgatccagaagatccacaacaaccactccaccatcaagggcttcctggagagggagcgcccggcgggcgagcgcgcgctccccaagatcaagtccggcaagaaccccgagatgacgcagctcaggcagctgaaggagctgctcgacaacgcgctcaacgtggcgcacttcgccaagctgctcacgaccaagaccacgctggacaaccaggacggcaacttctacggcgagttcggcgtcctgtacgacgagctggcgaagatcccgaccctgtacaacaaggtccgcgactacctgagccagaagcccttctccaccgagaagtacaagctcaacttcggcaacccgaccctcctgaacggctgggacctcaacaaggagaaggacaacttcggcgtgatcctccagaaggacggctgctactacctcgccctgctggacaaggcgcacaagaaggtcttcgacaacgccccgaacaccggcaagaacgtgtaccagaagatggtgtacaagctgctccccggccccaacaagatgctgccgaaggtgttcttcgcgaagtccaacctcgactactacaaccccagcgccgagctcctggacaagtacgccaagggcacgcacaagaagggcgacaacttcaacctcaaggactgccacgcgctgatcgacttcttcaaggcgggcatcaacaagcaccccgagtggcagcacttcggcttcaagttcagcccgacctccagctacagggacctcagcgacttctaccgcgaggtggagccccagggctaccaggtgaagttcgtcgacatcaacgccgactacatcgacgagctcgtcgagcagggcaagctctacctgttccagatctacaacaaggacttctccccgaaggcccacggcaagccgaacctccacacgctctacttcaaggccctcttcagcgaggacaacctggccgacccgatctacaagctcaacggcgaggcgcagatcttctaccgcaaggccagcctggacatgaacgaaacgaccatccacagggccggcgaggtcctggagaacaagaacccggacaacccgaagaagaggcagttcgtctacgacatcatcaaggacaagaggtacacccaggacaagttcatgctccacgtcccgatcaccatgaacttcggcgtccagggcatgaccatcaaggagttcaacaagaaggtcaaccagagcatccagcagtacgacgaggtgaacgtcatcggcatcgaccgcggcgagaggcacctgctctacctgacggtcatcaactccaagggcgagatcctcgagcagcgcagcctgaacaccatccagcagttcgactaccagaagaagctggacaacagggagaaggagagggtggccgcccgccaggcctggggcgagatcgaaacgatcaaggagctcaagtccggctacctcagccacgtcgtgcaccagatcaaccagctcatgctgaagtacaacgcgatcgtggtcctcgaggacctgaacttcggcttcaagaggggccgcttcaaggtggagaagcagatctaccagaacttcgagaacgccctgatcaagaagctcaaccacctggtcctcaaggacaaggcggacgacgagatcggcagctacaagaacgcgctccagctgaccaacaacttcacggacctcaagtccatcggcaagcagacgggcttcctgttctacgtgccggcgtggaacacctccaagatcgacccggaaaccggcttcgtcgacctgctcaagccgcgctacgagaacatcgcgcagtcccaggcgttcttcggcaagttcgacaagatctgctacaacaccgacaagggctacttcgagttccacatcgactacgcgaagttcaccgacaaggccaagaactccaggcagaagtgggccatctgcagccacggcgacaagcgctacgtgtacgacaagacggcgaaccagaacaagggcgcggccaagggcatcaacgtgaacgacgagctgaagtccctcttcgcgcgctaccacatcaacgacaagcagccgaacctcgtcatggacatctgccagaacaacgacaaggagttccacaagagcctgatgtgcctgctcaagaccctgctcgccctccgctactccaacgcgagctccgacgaggacttcatcctcagccccgtcgcgaacgacgagggcgtgttcttcaactccgccctcgcggacgacacgcagccgcagaacgccgacgcgaacggcgcctaccacatcgccctcaagggcctgtggctgctcaacgagctcaagaactccgacgacctgaacaaggtgaagctcgccattgacaaccagacgtggctgaatttcgctcagaatagggggggcgggggctcaggcgggggcgggagcggcggcgggggctctgggggcggcggcagcggcgggggcggcagcgggggcggcgggtcgccgaagaagaagcgcaaggtgtccggcggcagctccggcggcagcccgaagaagaagcgcaaagtgtgagggacccgatcgttcaaacatttggcaataaagtttcttaagattgaatcctgttgccggtcttgcgatgattatcatataatttctgttgaattacgttaagcatgtaataattaacatgtaatgcatgacgttatttatgagatgggtttttatgattagagtcccgcaattatacatttaatacgcgatagaaaacaaaatatagcgcgcaaactaggataaattatcgcgcgcggtgtcatctatgttactagatcggtaccgaattcattatgtggtctaggtaggttctatatataagaaaacttgaaatgttctaaaaaaaaattcaagcccatgcatgattgaagcaaacggtatagcaacggtgttaacctgatctagtgatctcttgcaatccttaacggccacctaccgcaggtagcaaacggcgtccccctcctcgatatctccgcggcgacctctggctttttccgcggaattgcgcggtggggacggattccacgagaccgcgacgcaaccgcctctcgccgctgggccccacaccgctcggtgccgtagcctcacgggactctttctccctcctcccccgttataaattggcttcatcccctccttgcctcatccatccaaatcccagtccccaatcccatcccttcgtaggagaaattcatcgaagctaagcgaatcctcgcgatcctctcaaggtactgcgagttttcgatccccctctcgacccctcgtatgtttgtgtttgtcgtagcgtttgattaggtatgctttccctgtttgtgttcgtcgtagcgtttgattaggtatgctttccctgttcgtgttcatcgtagtgtttgattaggtcgtgtgaggcgatggcctgctcgcgtccttcgatctgtagtcgatttgcgggtcgtggtgtagatctgcgggctgtgatgaagttatttggtgtgatctgctcgcctgattctgcgggttggctcgagtagatatgatggttggaccggttggttcgtttaccgcgctagggttgggctgggatgatgttgcatgcgccgttgcgcgtgatcccgcagcaggacttgcgtttgattgccagatctcgttacgattatgtgatttggtttggactttttagatctgtagcttctgcttatgtgccagatgcgcctactgctcatatgcctgatgataatcataaatggctgtggaactaactagttgattgcggagtcatgtatcagctacaggtgtagggactagctacaggtgtagggacttgcgtctaattgtttggtcctttactcatgttgcaattatgcaatttagtttagattgtttgttccactcatctaggctgtaaaagggacactgcttagattgctgtttaatctttttagtagattatattatattggtaacttattacccctattacatgccatacgtgacttctgctcatgcctgatgataatcatagatcactgtggaattaattagttgattgttgaatcatgtttcatgtacataccacggcacaattgcttagttccttaacaaatgcaaattttactgatccatgtatgatttgcgtggttctctaatgtgaaatactatagctacttgttagtaagaatcaggttcgtatgcttaatgctgtatgtgccttctgctcatgcctgatgataatcatatatcactggaattaattagttgatcgtttaatcatatatcaagtacataccatgccacaatttttagtcacttaacccatgcagattgaactggtccctgcatgttttgctaaattgttctattctgattagaccatatatcatgtatttttttttggtaatggttctcttattttaaatgctatatagttctggtacttgttagaaagatctgcttcatagtttagttgcctatccctcgaattaggatgctgagcagctgatcctatagctttgtttcatgtatcaattcttttgtgttcaacagtcagtttttgttagattcattgtaacttatggtcgcttactcttctggtcctcaatgcttgcagaagcttgaaattctgatgagtccgtgaggacgaaacgagtaagctcgtcaatttctactgtttgtagatgggaaagaccgaggagaagatctaatttctactgtttgtagatgcaccaaggaaggggaggagatcaatttctactgtttgtagatgtcacagatcacaaacttcaaatgaatttctactgtttgtagatacgcccagaaagcatacgcagtcggccggcatggtcccagcctcctcgctggcgccggctgggcaacatgcttcggcatggcgaatgggacgatcgttcaaacatttggcaataaagtttcttaagattgaatcctgttgccggtcttgcgatgattatcatataatttctgttgaattacgttaagcatgtaataattaacatgtaatgcatgacgttatttatgagatgggtttttatgattagagtcccgcaattatacatttaatacgcgatagaaaacaaaatatagcgcgcaaactaggataaattatcgcgcgcggtgtcatctatgttactagatccctaggctgcagtgcagcgtgacccggtcgtgcccctctctagagataatgagcattgcatgtctaagttataaaaaattaccacatattttttttgtcacacttgtttgaagtgcagtttatctatctttatacatatatttaaactttactctacgaataatataatctatagtactacaataatatcagtgttttagagaatcatataaatgaacagttagacatggtctaaaggacaattgagtattttgacaacaggactctacagttttatctttttagtgtgcatgtgttctcctttttttttgcaaatagcttcacctatataatacttcatccattttattagtacatccatttagggtttagggttaatggtttttatagactaatttttttagtacatctattttattctattttagcctctaaattaagaaaactaaaactctattttagtttttttatttaataatttagatataaaatagaataaaataaagtgactaaaaattaaacaaataccctttaagaaattaaaaaaactaaggaaacatttttcttgtttcgagtagataatgccagcctgttaaacgccgtcgacgagtctaacggacaccaaccagcgaaccagcagcgtcgcgtcgggccaagcgaagcagacggcacggcatctctgtcgctgcctctggacccctctcgagagttccgctccaccgttggacttgctccgctgtcggcatccagaaattgcgtggcggagcggcagacgtgagccggcacggcaggcggcctcctcctcctctcacggcaccggcagctacgggggattcctttcccaccgctccttcgctttcccttcctcgcccgccgtaataaatagacaccccctccacaccctctttccccaacctcgtgttgttcggagcgcacacacacacaaccagatctcccccaaatccacccgtcggcacctccgcttcaaggtacgccgctcgtcctccccccccccccctctctaccttctctagatcggcgttccggtccatggttagggcccggtagttctacttctgttcatgtttgtgttagatccgtgtttgtgttagatccgtgctgctagcgttcgtacacggatgcgacctgtacgtcagacacgttctgattgctaacttgccagtgtttctctttggggaatcctgggatggctctagccgttccgcagacgggatcgatttcatgattttttttgtttcgttgcatagggtttggtttgcccttttcctttatttcaatatatgccgtgcacttgtttgtcgggtcatcttttcatgcttttttttgtcttggttgtgatgatgtggtctggttgggcggtcgttctagatcggagtagaattctgtttcaaactacctggtggatttattaattttggatctgtatgtgtgtgccatacatattcatagttacgaattgaagatgatggatggaaatatcgatctaggataggtatacatgttgatgcgggttttactgatgcatatacagagatgctttttgttcgcttggttgtgatgatgtggtgtggttgggcggtcgttcattcgttctagatcggagtagaatactgtttcaaactacctggtgtatttattaattttggaactgtatgtgtgtgtcatacatcttcatagttacgagtttaagatggatggaaatatcgatctaggataggtatacatgttgatgtgggttttactgatgcatatacatgatggcatatgcagcatctattcatatgctctaaccttgagtacctatctattataataaacaagtatgttttataattattttgatcttgatatacttggatgatggcatatgcagcagctatatgtggatttttttagccctgccttcatacgctatttatttgcttggtactgtttcttttgtcgatgctcaccctgttgtttggtgttacttctgcagggatcaccgatcatgcaaaaactcattaactcagtgcaaaactatgcctggggcagcaaaacggcgttgactgaactttatggtatggaaaatccgtccagccagccgatggccgagctgtggatgggcgcacatccgaaaagcagttcacgagtgcagaatgccgccggagatatcgtttcactgcgtgatgtgattgagagtgataaatcgactctgctcggagaggccgttgccaaacgctttggcgaactgcctttcctgttcaaagtattatgcgcagcacagccactctccattcaggttcatccaaacaaacacaattctgaaatcggttttgccaaagaaaatgccgcaggtatcccgatggatgccgccgagcgtaactataaagatcctaaccacaagccggagctggtttttgcgctgacgcctttccttgcgatgaacgcgtttcgtgaattttccgagattgtctccctactccagccggtcgcaggtgcacatccggcgattgctcactttttacaacagcctgatgccgaacgtttaagcgaactgttcgccagcctgttgaatatgcagggtgaagaaaaatcccgcgcgctggcgattttaaaatcggccctcgatagccagcagggtgaaccgtggcaaacgattcgtttaatttctgaattttacccggaagacagcggtctgttctccccgctattgctgaatgtggtgaaattgaaccctggcgaagcgatgttcctgttcgctgaaacaccgcacgcttacctgcaaggcgtggcgctggaagtgatggcaaactccgataacgtgctgcgtgcgggtctgacgcctaaatacattgatattccggaactggttgccaatgtgaaattcgaagccaaaccggctaaccagttgttgacccagccggtgaaacaaggtgcagaactggacttcccgattccagtggatgattttgccttctcgctgcatgaccttagtgataaagaaaccaccattagccagcagagtgccgccattttgttctgcgtcgaaggcgatgcaacgttgtggaaaggttctcagcagttacagcttaaaccgggtgaatcagcgtttattgccgccaacgaatcaccggtgactgtcaaaggccacggccgtttagcgcgtgtttacaacaagctgtaagagcttactgaaaaaattaacatctcttgctaagctgggagctcgatccgtcgacctgcagatcgttcaaacatttggcaataaagtttcttaagattgaatcctgttgccggtcttgcgatgattatcatataatttctgttgaattacgttaagcatgtaataattaacatgtaatgcatgacgttatttatgagatgggtttttatgattagagtcccgcaattatacatttaatacgcgatagaaaacaaaatatagcgcgcaaactaggataaattatcgcgcgcggtgtcatctatgttactagatccggaccgcctgcaggcccgggggcgcgccctaattagctaacggccaggatcgccgcgtgagcctttagcaactagctagattaattaacgcaatctgttattaagttgtctaagcgtcaatttgtttacaccacaatatatcctgccaccagccagccaacagctccccgaccggcagctcggcacaaaatcaccactcgatacaggcagcccatcagaattaattctcatgtttgacagcttatcatcgactgcacggtgcaccaatgcttctggcgtcaggcagccatcggaagctgtggtatggctgtgcaggtcgtaaatcactgcataattcgtgtcgctcaaggcgcactcccgttctggataatgttttttgcgccgacatcataacggttctggcaaatattctgaaatgagctgttgacaattaatcatccggctcgtataatgtgtggaattgtgagcggataacaatttcacacaggaaacagaccatgagggaagcgttgatcgccgaagtatcgactcaactatcagaggtagttggcgtcatcgagcgccatctcgaaccgacgttgctggccgtacatttgtacggctccgcagtggatggcggcctgaagccacacagtgatattgatttgctggttacggtgaccgtaaggcttgatgaaacaacgcggcgagctttgatcaacgaccttttggaaacttcggcttcccctggagagagcgagattctccgcgctgtagaagtcaccattgttgtgcacgacgacatcattccgtggcgttatccagctaagcgcgaactgcaatttggagaatggcagcgcaatgacattcttgcaggtatcttcgagccagccacgatcgacattgatctggctatcttgctgacaaaagcaagagaacatagcgttgccttggtaggtccagcggcggaggaactctttgatccggttcctgaacaggatctatttgaggcgctaaatgaaaccttaacgctatggaactcgccgcccgactgggctggcgatgagcgaaatgtagtgcttacgttgtcccgcatttggtacagcgcagtaaccggcaaaatcgcgccgaaggatgtcgctgccgactgggcaatggagcgcctgccggcccagtatcagcccgtcatacttgaagctaggcaggcttatcttggacaagaagatcgcttggcctcgcgcgcagatcagttggaagaatttgttcactacgtgaaaggcgagatcaccaaagtagtcggcaaataaagctctagtggatctccgtacccagggatctggctcgcggcggacgcacgacgccggggcgagaccataggcgatctcctaaatcaatagtagctgtaacctcgaagcgtttcacttgtaacaacgattgagaatttttgtcataaaattgaaatacttggttcgcatttttgtcatccgcggtcagccgcaattctgacgaactgcccatttagctggagatgattgtacatccttcacgtgaaaatttctcaagcgctgtgaacaagggttcagattttagattgaaaggtgagccgttgaaacacgttcttcttgtcgatgacgacgtcgctatgcggcatcttattattgaataccttacgatccacgccttcaaagtgaccgcggtagccgacagcacccagttcacaagagtactctcttccgcgacggtcgatgtcgtggttgttgatctagatttaggtcgtgaagatgggctcgagatcgttcgtaatctggcggcaaagtctgatattccaatcataattatcagtggcgaccgccttgaggagacggataaagttgttgcactcgagctaggagcaagtgattttatcgctaagccgttcagtatcagagagtttctagcacgcattcgggttgccttgcgcgtgcgccccaacgttgtccgctccaaagaccgacggtctttttgttttactgactggacacttaatctcaggcaacgtcgcttgatgtccgaagctggcggtgaggtgaaacttacggcaggtgagttcaatcttctcctcgcgtttttagagaaaccccgcgacgttctatcgcgcgagcaacttctcattgccagtcgagtacgcgacgaggaggtttatgacaggagtatagatgttctcattttgaggctgcgccgcaaacttgaggcagatccgtcaagccctcaactgataaaaacagcaagaggtgccggttatttctttgacgcggacgtgcaggtttcgcacggggggacgatggcagcctgagccaattcccagatccccgaggaatcggcgtgagcggtcgcaaaccatccggcccggtacaaatcggcgcggcgctgggtgatgacctggtggagaagttgaaggccgcgcaggccgcccagcggcaacgcatcgaggcagaagcacgccccggtgaatcgtggcaagcggccgctgatcgaatccgcaaagaatcccggcaaccgccggcagccggtgcgccgtcgattaggaagccgcccaagggcgacgagcaaccagattttttcgttccgatgctctatgacgtgggcacccgcgatagtcgcagcatcatggacgtggccgttttccgtctgtcgaagcgtgaccgacgagctggcgaggtgatccgctacgagcttccagacgggcacgtagaggtttccgcagggccggccggcatggccagtgtgtgggattacgacctggtactgatggcggtttcccatctaaccgaatccatgaaccgataccgggaagggaagggagacaagcccggccgcgtgttccgtccacacgttgcggacgtactcaagttctgccggcgagccgatggcggaaagcagaaagacgacctggtagaaacctgcattcggttaaacaccacgcacgttgccatgcagcgtacgaagaaggccaagaacggccgcctggtgacggtatccgagggtgaagccttgattagccgctacaagatcgtaaagagcgaaaccgggcggccggagtacatcgagatcgagctggctgattggatgtaccgcgagatcacagaaggcaagaacccggacgtgctgacggttcaccccgattactttttgatcgatcccggcatcggccgttttctctaccgcctggcacgccgcgccgcaggcaaggcagaagccagatggttgttcaagacgatctacgaacgcagtggcagcgccggagagttcaagaagttctgtttcaccgtgcgcaagctgatcgggtcaaatgacctgccggagtacgatttgaaggaggaggcggggcaggctggcccgatcctagtcatgcgctaccgcaacctgatcgagggcgaagcatccgccggttcctaatgtacggagcagatgctagggcaaattgccctagcaggggaaaaaggtcgaaaaggtctctttcctgtggatagcacgtacattgggaacccaaagccgtacattgggaaccggaacccgtacattgggaacccaaagccgtacattgggaaccggtcacacatgtaagtgactgatataaaagagaaaaaaggcgatttttccgcctaaaactctttaaaacttattaaaactcttaaaacccgcctggcctgtgcataactgtctggccagcgcacagccgaagagctgcaaaaagcgcctacccttcggtcgctgcgctccctacgccccgccgcttcgcgtcggcctatcgcggccgctggccgctcaaaaatggctggcctacggccaggcaatctaccagggcgcggacaagccgcgccgtcgccactcgaccgccggcgctgaggtctgcctcgtgaagaaggtgttgctgactcataccaggcctgaatcgccccatcatccagccagaaagtgagggagccacggttgatgagagctttgttgtaggtggaccagttggtgattttgaacttttgctttgccacggaacggtctgcgttgtcgggaagatgcgtgatctgatccttcaactcagcaaaagttcgatttattcaacaaagccgccgtcccgtcaagtcagcgtaatgctctgccagtgttacaaccaattaaccaattctgattagaaaaactcatcgagcatcaaatgaaactgcaatttattcatatcaggattatcaataccatatttttgaaaaagccgtttctgtaatgaaggagaaaactcaccgaggcagttccataggatggcaagatcctggtatcggtctgcgattccgactcgtccaacatcaatacaacctattaatttcccctcgtcaaaaataaggttatcaagtgagaaatcaccatgagtgacgactgaatccggtgagaatggcaaaagctctgcattaatgaatcggccaacgcgcggggagaggcggtttgcgtattgggcgctcttccgcttcctcgctcactgactcgctgcgctcggtcgttcggctgcggcgagcggtatcagctcactcaaaggcggtaatacggttatccacagaatcaggggataacgcaggaaagaacatgtgagcaaaaggccagcaaaaggccaggaaccgtaaaaaggccgcgttgctggcgtttttccataggctccgcccccctgacgagcatcacaaaaatcgacgctcaagtcagaggtggcgaaacccgacaggactataaagataccaggcgtttccccctggaagctccctcgtgcgctctcctgttccgaccctgccgcttaccggatacctgtccgcctttctcccttcgggaagcgtggcgctttctcatagctcacgctgtaggtatctcagttcggtgtaggtcgttcgctccaagctgggctgtgtgcacgaaccccccgttcagcccgaccgctgcgccttatccggtaactatcgtcttgagtccaacccggtaagacacgacttatcgccactggcagcagccactggtaacaggattagcagagcgaggtatgtaggcggtgctacagagttcttgaagtggtggcctaactacggctacactagaagaacagtatttggtatctgcgctctgctgaagccagttaccttcggaaaaagagttggtagctcttgatccggcaaacaaaccaccgctggtagcggtggtttttttgtttgcaagcagcagattacgcgcagaaaaaaaggatctcaagaagatcctttgatcttttctacggggtctgacgctcagtggaacgaaaactcacgttaagggattttggtcatgagattatcaaaaaggatcttcacctagatccttttgatccggaatta

SEQ ID NO: 55 - DNA, 17504 bp, synthetic construct
  source 1..17504: mol_type = other DNA
attcctgtggttggcatgcacatacaaatggacgaacggataaaccttttcacgcccttttaaatatccgattattctaataaacgctcttttctcttaggtttacccgccaatatatcctgtcaaacactgatagtttaaactggcactagcctaacggtgttgactaactaggccgcttccctaattagctaacccgggggcgcgccgggaccggaattcattatgtggtctaggtaggttctatatataagaaaacttgaaatgttctaaaaaaaaattcaagcccatgcatgattgaagcaaacggtatagcaacggtgttaacctgatctagtgatctcttgcaatccttaacggccacctaccgcaggtagcaaacggcgtccccctcctcgatatctccgcggcgacctctggctttttccgcggaattgcgcggtggggacggattccacgagaccgcgacgcaaccgcctctcgccgctgggccccacaccgctcggtgccgtagcctcacgggactctttctccctcctcccccgttataaattggcttcatcccctccttgcctcatccatccaaatcccagtccccaatcccatcccttcgtaggagaaattcatcgaagctaagcgaatcctcgcgatcctctcaaggtactgcgagttttcgatccccctctcgacccctcgtatgtttgtgtttgtcgtagcgtttgattaggtatgctttccctgtttgtgttcgtcgtagcgtttgattaggtatgctttccctgttcgtgttcatcgtagtgtttgattaggtcgtgtgaggcgatggcctgctcgcgtccttcgatctgtagtcgatttgcgggtcgtggtgtagatctgcgggctgtgatgaagttatttggtgtgatctgctcgcctgattctgcgggttggctcgagtagatatgatggttggaccggttggttcgtttaccgcgctagggttgggctgggatgatgttgcatgcgccgttgcgcgtgatcccgcagcaggacttgcgtttgattgccagatctcgttacgattatgtgatttggtttggactttttagatctgtagcttctgcttatgtgccagatgcgcctactgctcatatgcctgatgataatcataaatggctgtggaactaactagttgattgcggagtcatgtatcagctacaggtgtagggactagctacaggtgtagggacttgcgtctaattgtttggtcctttactcatgttgcaattatgcaatttagtttagattgtttgttccactcatctaggctgtaaaagggacactgcttagattgctgtttaatctttttagtagattatattatattggtaacttattacccctattacatgccatacgtgacttctgctcatgcctgatgataatcatagatcactgtggaattaattagttgattgttgaatcatgtttcatgtacataccacggcacaattgcttagttccttaacaaatgcaaattttactgatccatgtatgatttgcgtggttctctaatgtgaaatactatagctacttgttagtaagaatcaggttcgtatgcttaatgctgtatgtgccttctgctcatgcctgatgataatcatatatcactggaattaattagttgatcgtttaatcatatatcaagtacataccatgccacaatttttagtcacttaacccatgcagattgaactggtccctgcatgttttgctaaattgttctattctgattagaccatatatcatgtatttttttttggtaatggttctcttattttaaatgctatatagttctggtacttgttagaaagatctgcttcatagtttagttgcctatccctcgaattaggatgctgagcagctgatcctatagctttgtttcatgtatcaattcttttgtgttcaacagtcagtttttgttagattcattgtaacttatggtcgcttactcttctggtcctcaatgcttgcagggatcccctaaatagaccatgccgaagaagaagcgcaaggtcgggggcgggggctcaggcgggggcgggagcggcggcgggggctctgggggcggcggcagcggcgggggcggcagcgggggcggcgggtcgatgctgttccaggatttcactcatctgtaccctctctcaaagactgttcggttcgagctcaagcctattgggcggactctggagcacatccacgcgaagaacttcctcagccaggacgaaaccatggccgacatgtaccagaaggtcaaggtcatcctcgacgactaccacagggacttcatcgcggacatgatgggcgaggtgaagctgacgaagctcgccgagttctacgacgtctacctcaagttccgcaagaacccgaaggacgacggcctccagaagcagctcaaggacctgcaggccgtcctgaggaaggagtccgtcaagcccatcggcagcggcggcaagtacaagaccggctacgacaggctgttcggcgccaagctgttcaaggacggcaaggagctcggcgacctggcgaagttcgtgatcgcgcaggagggcgagagctcccccaagctggcccacctggcccacttcgagaagttcagcacgtacttcaccggcttccacgacaacaggaagaacatgtacagcgacgaggacaagcacacggccatcgcctaccgcctcatccacgagaacctgccccgcttcatcgacaacctgcagatcctgacgaccatcaagcagaagcactccgccctgtacgaccagatcatcaacgagctcaccgcgagcggcctcgacgtgtccctcgccagccacctcgacggctaccacaagctcctgacccaggagggcatcaccgcctacaaccgcatcatcggcgaggtgaacggctacaccaacaagcacaaccagatctgccacaagtccgagaggatcgccaagctcaggcccctgcacaagcagatcctcagcgacggcatgggcgtgagcttcctcccgtccaagttcgccgacgactccgagatgtgccaggccgtgaacgagttctacaggcactacaccgacgtgttcgccaaggtgcagtccctgttcgacggcttcgacgaccaccagaaggacggcatctacgtggagcacaagaacctgaacgagctgtccaagcaggccttcggcgacttcgccctcctgggccgcgtgctggacggctactacgtggacgtcgtgaacccggagttcaacgagcgcttcgcgaaggcgaagacggacaacgcgaaggccaagctcaccaaggagaaggacaagttcatcaagggcgtccacagcctcgcgtccctggagcaggcgatcgagcaccacaccgcgcgccacgacgacgagtccgtgcaggccggcaagctcggccagtacttcaagcacggcctggccggcgtcgacaacccgatccagaagatccacaacaaccactccaccatcaagggcttcctggagagggagcgcccggcgggcgagcgcgcgctccccaagatcaagtccggcaagaaccccgagatgacgcagctcaggcagctgaaggagctgctcgacaacgcgctcaacgtggcgcacttcgccaagctgctcacgaccaagaccacgctggacaaccaggacggcaacttctacggcgagttcggcgtcctgtacgacgagctggcgaagatcccgaccctgtacaacaaggtccgcgactacctgagccagaagcccttctccaccgagaagtacaagctcaacttcggcaacccgaccctcctgaacggctgggacctcaacaaggagaaggacaacttcggcgtgatcctccagaaggacggctgctactacctcgccctgctggacaaggcgcacaagaaggtcttcgacaacgccccgaacaccggcaagaacgtgtaccagaagatggtgtacaagctgctccccggccccaacaagatgctgccgaaggtgttcttcgcgaagtccaacctcgactactacaaccccagcgccgagctcctggacaagtacgccaagggcacgcacaagaagggcgacaacttcaacctcaaggactgccacgcgctgatcgacttcttcaaggcgggcatcaacaagcaccccgagtggcagcacttcggcttcaagttcagcccgacctccagctacagggacctcagcgacttctaccgcgaggtggagccccagggctaccaggtgaagttcgtcgacatcaacgccgactacatcgacgagctcgtcgagcagggcaagctctacctgttccagatctacaacaaggacttctccccgaaggcccacggcaagccgaacctccacacgctctacttcaaggccctcttcagcgaggacaacctggccgacccgatctacaagctcaacggcgaggcgcagatcttctaccgcaaggccagcctggacatgaacgaaacgaccatccacagggccggcgaggtcctggagaacaagaacccggacaacccgaagaagaggcagttcgtctacgacatcatcaaggacaagaggtacacccaggacaagttcatgctccacgtcccgatcaccatgaacttcggcgtccagggcatgaccatcaaggagttcaacaagaaggtcaaccagagcatccagcagtacgacgaggtgaacgtcatcggcatcgaccgcggcgagaggcacctgctctacctgacggtcatcaactccaagggcgagatcctcgagcagcgcagcctgaacaccatccagcagttcgactaccacaagatcctcgacaagcgcgagatcgagaggctgaacgcgcgcgtcggctggggcgagatcgaaacgatcaaggagctcaagtccggctacctcagccacgtcgtgcaccagatcaaccagctcatgctgaagtacaacgcgatcgtggtcctcgaggacctgaacttcggcttcaagaggggccgcttcaaggtggagaagcagatctaccagaacttcgagaacgccctgatcaagaagctcaaccacctggtcctcaaggacaaggcggacgacgagatcggcagctacaagaacgcgctccagctgaccaacaacttcacggacctcaagtccatcggcaagcagacgggcttcctgttctacgtgccggcgtggaacacctccaagatcgacccggaaaccggcttcgtcgacctgctcaagccgcgctacgagaacatcgcgcagtcccaggcgttcttcggcaagttcgacaagatctgctacaacaccgacaagggctacttcgagttccacatcgactacgcgaagttcaccgacaaggccaagaactccaggcagaagtgggccatctgcagccacggcgacaagcgctacgtgtacgacaagacggcgaaccagaacaagggcgcggccaagggcatcaacgtgaacgacgagctgaagtccctcttcgcgcgctaccacatcaacgacaagcagccgaacctcgtcatggacatctgccagaacaacgacaaggagttccacaagagcctgatgtgcctgctcaagaccctgctcgccctccgctactccaacgcgagctccgacgaggacttcatcctcagccccgtcgcgaacgacgagggcgtgttcttcaactccgccctcgcggacgacacgcagccgcagaacgccgacgcgaacggcgcctaccacatcgccctcaagggcctgtggctgctcaacgagctcaagaactccgacgacctgaacaaggtgaagctcgccattgacaaccagacgtggctgaatttcgctcagaatagggggggcgggggctcaggcgggggcgggagcggcggcgggggctctgggggcggcggcagcggcgggggcggcagcgggggcggcgggtcgccgaagaagaagcgcaaggtgtccggcggcagctccggcggcagcccgaagaagaagcgcaaagtgtgagggacccgatcgttcaaacatttggcaataaagtttcttaagattgaatcctgttgccggtcttgcgatgattatcatataatttctgttgaattacgttaagcatgtaataattaacatgtaatgcatgacgttatttatgagatgggtttttatgattagagtcccgcaattatacatttaatacgcgatagaaaacaaaatatagcgcgcaaactaggataaattatcgcgcgcggtgtcatctatgttactagatcggtaccgaattcattatgtggtctaggtaggttctatatataagaaaacttgaaatgttctaaaaaaaaattcaagcccatgcatgattgaagcaaacggtatagcaacggtgttaacctgatctagtgatctcttgcaatccttaacggccacctaccgcaggtagcaaacggcgtccccctcctcgatatctccgcggcgacctctggctttttccgcggaattgcgcggtggggacggattccacgagaccgcgacgcaaccgcctctcgccgctgggccccacaccgctcggtgccgtagcctcacgggactctttctccctcctcccccgttataaattggcttcatcccctccttgcctcatccatccaaatcccagtccccaatcccatcccttcgtaggagaaattcatcgaagctaagcgaatcctcgcgatcctctcaaggtactgcgagttttcgatccccctctcgacccctcgtatgtttgtgtttgtcgtagcgtttgattaggtatgctttccctgtttgtgttcgtcgtagcgtttgattaggtatgctttccctgttcgtgttcatcgtagtgtttgattaggtcgtgtgaggcgatggcctgctcgcgtccttcgatctgtagtcgatttgcgggtcgtggtgtagatctgcgggctgtgatgaagttatttggtgtgatctgctcgcctgattctgcgggttggctcgagtagatatgatggttggaccggttggttcgtttaccgcgctagggttgggctgggatgatgttgcatgcgccgttgcgcgtgatcccgcagcaggacttgcgtttgattgccagatctcgttacgattatgtgatttggtttggactttttagatctgtagcttctgcttatgtgccagatgcgcctactgctcatatgcctgatgataatcataaatggctgtggaactaactagttgattgcggagtcatgtatcagctacaggtgtagggactagctacaggtgtagggacttgcgtctaattgtttggtcctttactcatgttgcaattatgcaatttagtttagattgtttgttccactcatctaggctgtaaaagggacactgcttagattgctgtttaatctttttagtagattatattatattggtaacttattacccctattacatgccatacgtgacttctgctcatgcctgatgataatcatagatcactgtggaattaattagttgattgttgaatcatgtttcatgtacataccacggcacaattgcttagttccttaacaaatgcaaattttactgatccatgtatgatttgcgtggttctctaatgtgaaatactatagctacttgttagtaagaatcaggttcgtatgcttaatgctgtatgtgccttctgctcatgcctgatgataatcatatatcactggaattaattagttgatcgtttaatcatatatcaagtacataccatgccacaatttttagtcacttaacccatgcagattgaactggtccctgcatgttttgctaaattgttctattctgattagaccatatatcatgtatttttttttggtaatggttctcttattttaaatgctatatagttctggtacttgttagaaagatctgcttcatagtttagttgcctatccctcgaattaggatgctgagcagctgatcctatagctttgtttcatgtatcaattcttttgtgttcaacagtcagtttttgttagattcattgtaacttatggtcgcttactcttctggtcctcaatgcttgcagaagcttgaaattctgatgagtccgtgaggacgaaacgagtaagctcgtcaatttctactgtttgtagatgggaaagaccgaggagaagatctaatttctactgtttgtagatgcaccaaggaaggggaggagatcaatttctactgtttgtagatgtcacagatcacaaacttcaaatgaatttctactgtttgtagatacgcccagaaagcatacgcagtcggccggcatggtcccagcctcctcgctggcgccggctgggcaacatgcttcggcatggcgaatgggacgatcgttcaaacatttggcaataaagtttcttaagattgaatcctgttgccggtcttgcgatgattatcatataatttctgttgaattacgttaagcatgtaataattaacatgtaatgcatgacgttatttatgagatgggtttttatgattagagtcccgcaattatacatttaatacgcgatagaaaacaaaatatagcgcgcaaactaggataaattatcgcgcgcggtgtcatctatgttactagatccctaggctgcagtgcagcgtgacccggtcgtgcccctctctagagataatgagcattgcatgtctaagttataaaaaattaccacatattttttttgtcacacttgtttgaagtgcagtttatctatctttatacatatatttaaactttactctacgaataatataatctatagtactacaataatatcagtgttttagagaatcatataaatgaacagttagacatggtctaaaggacaattgagtattttgacaacaggactctacagttttatctttttagtgtgcatgtgttctcctttttttttgcaaatagcttcacctatataatacttcatccattttattagtacatccatttagggtttagggttaatggtttttatagactaatttttttagtacatctattttattctattttagcctctaaattaagaaaactaaaactctattttagtttttttatttaataatttagatataaaatagaataaaataaagtgactaaaaattaaacaaataccctttaagaaattaaaaaaactaaggaaacatttttcttgtttcgagtagataatgccagcctgttaaacgccgtcgacgagtctaacggacaccaaccagcgaaccagcagcgtcgcgtcgggccaagcgaagcagacggcacggcatctctgtcgctgcctctggacccctctcgagagttccgctccaccgttggacttgctccgctgtcggcatccagaaattgcgtggcggagcggcagacgtgagccggcacggcaggcggcctcctcctcctctcacggcaccggcagctacgggggattcctttcccaccgctccttcgctttcccttcctcgcccgccgtaataaatagacaccccctccacaccctctttccccaacctcgtgttgttcggagcgcacacacacacaaccagatctcccccaaatccacccgtcggcacctccgcttcaaggtacgccgctcgtcctccccccccccccctctctaccttctctagatcggcgttccggtccatggttagggcccggtagttctacttctgttcatgtttgtgttagatccgtgtttgtgttagatccgtgctgctagcgttcgtacacggatgcgacctgtacgtcagacacgttctgattgctaacttgccagtgtttctctttggggaatcctgggatggctctagccgttccgcagacgggatcgatttcatgattttttttgtttcgttgcatagggtttggtttgcccttttcctttatttcaatatatgccgtgcacttgtttgtcgggtcatcttttcatgcttttttttgtcttggttgtgatgatgtggtctggttgggcggtcgttctagatcggagtagaattctgtttcaaactacctggtggatttattaattttggatctgtatgtgtgtgccatacatattcatagttacgaattgaagatgatggatggaaatatcgatctaggataggtatacatgttgatgcgggttttactgatgcatatacagagatgctttttgttcgcttggttgtgatgatgtggtgtggttgggcggtcgttcattcgttctagatcggagtagaatactgtttcaaactacctggtgtatttattaattttggaactgtatgtgtgtgtcatacatcttcatagttacgagtttaagatggatggaaatatcgatctaggataggtatacatgttgatgtgggttttactgatgcatatacatgatggcatatgcagcatctattcatatgctctaaccttgagtacctatctattataataaacaagtatgttttataattattttgatcttgatatacttggatgatggcatatgcagcagctatatgtggatttttttagccctgccttcatacgctatttatttgcttggtactgtttcttttgtcgatgctcaccctgttgtttggtgttacttctgcagggatcaccgatcatgcaaaaactcattaactcagtgcaaaactatgcctggggcagcaaaacggcgttgactgaactttatggtatggaaaatccgtccagccagccgatggccgagctgtggatgggcgcacatccgaaaagcagttcacgagtgcagaatgccgccggagatatcgtttcactgcgtgatgtgattgagagtgataaatcgactctgctcggagaggccgttgccaaacgctttggcgaactgcctttcctgttcaaagtattatgcgcagcacagccactctccattcaggttcatccaaacaaacacaattctgaaatcggttttgccaaagaaaatgccgcaggtatcccgatggatgccgccgagcgtaactataaagatcctaaccacaagccggagctggtttttgcgctgacgcctttccttgcgatgaacgcgtttcgtgaattttccgagattgtctccctactccagccggtcgcaggtgcacatccggcgattgctcactttttacaacagcctgatgccgaacgtttaagcgaactgttcgccagcctgttgaatatgcagggtgaagaaaaatcccgcgcgctggcgattttaaaatcggccctcgatagccagcagggtgaaccgtggcaaacgattcgtttaatttctgaattttacccggaagacagcggtctgttctccccgctattgctgaatgtggtgaaattgaaccctggcgaagcgatgttcctgttcgctgaaacaccgcacgcttacctgcaaggcgtggcgctggaagtgatggcaaactccgataacgtgctgcgtgcgggtctgacgcctaaatacattgatattccggaactggttgccaatgtgaaattcgaagccaaaccggctaaccagttgttgacccagccggtgaaacaaggtgcagaactggacttcccgattccagtggatgattttgccttctcgctgcatgaccttagtgataaagaaaccaccattagccagcagagtgccgccattttgttctgcgtcgaaggcgatgcaacgttgtggaaaggttctcagcagttacagcttaaaccgggtgaatcagcgtttattgccgccaacgaatcaccggtgactgtcaaaggccacggccgtttagcgcgtgtttacaacaagctgtaagagcttactgaaaaaattaacatctcttgctaagctgggagctcgatccgtcgacctgcagatcgttcaaacatttggcaataaagtttcttaagattgaatcctgttgccggtcttgcgatgattatcatataatttctgttgaattacgttaagcatgtaataattaacatgtaatgcatgacgttatttatgagatgggtttttatgattagagtcccgcaattatacatttaatacgcgatagaaaacaaaatatagcgcgcaaactaggataaattatcgcgcgcggtgtcatctatgttactagatccggaccgcctgcaggcccgggggcgcgccctaattagctaacggccaggatcgccgcgtgagcctttagcaactagctagattaattaacgcaatctgttattaagttgtctaagcgtcaatttgtttacaccacaatatatcctgccaccagccagccaacagctccccgaccggcagctcggcacaaaatcaccactcgatacaggcagcccatcagaattaattctcatgtttgacagcttatcatcgactgcacggtgcaccaatgcttctggcgtcaggcagccatcggaagctgtggtatggctgtgcaggtcgtaaatcactgcataattcgtgtcgctcaaggcgcactcccgttctggataatgttttttgcgccgacatcataacggttctggcaaatattctgaaatgagctgttgacaattaatcatccggctcgtataatgtgtggaattgtgagcggataacaatttcacacaggaaacagaccatgagggaagcgttgatcgccgaagtatcgactcaactatcagaggtagttggcgtcatcgagcgccatctcgaaccgacgttgctggccgtacatttgtacggctccgcagtggatggcggcctgaagccacacagtgatattgatttgctggttacggtgaccgtaaggcttgatgaaacaacgcggcgagctttgatcaacgaccttttggaaacttcggcttcccctggagagagcgagattctccgcgctgtagaagtcaccattgttgtgcacgacgacatcattccgtggcgttatccagctaagcgcgaactgcaatttggagaatggcagcgcaatgacattcttgcaggtatcttcgagccagccacgatcgacattgatctggctatcttgctgacaaaagcaagagaacatagcgttgccttggtaggtccagcggcggaggaactctttgatccggttcctgaacaggatctatttgaggcgctaaatgaaaccttaacgctatggaactcgccgcccgactgggctggcgatgagcgaaatgtagtgcttacgttgtcccgcatttggtacagcgcagtaaccggcaaaatcgcgccgaaggatgtcgctgccgactgggcaatggagcgcctgccggcccagtatcagcccgtcatacttgaagctaggcaggcttatcttggacaagaagatcgcttggcctcgcgcgcagatcagttggaagaatttgttcactacgtgaaaggcgagatcaccaaagtagtcggcaaataaagctctagtggatctccgtacccagggatctggctcgcggcggacgcacgacgccggggcgagaccataggcgatctcctaaatcaatagtagctgtaacctcgaagcgtttcacttgtaacaacgattgagaatttttgtcataaaattgaaatacttggttcgcatttttgtcatccgcggtcagccgcaattctgacgaactgcccatttagctggagatgattgtacatccttcacgtgaaaatttctcaagcgctgtgaacaagggttcagattttagattgaaaggtgagccgttgaaacacgttcttcttgtcgatgacgacgtcgctatgcggcatcttattattgaataccttacgatccacgccttcaaagtgaccgcggtagccgacagcacccagttcacaagagtactctcttccgcgacggtcgatgtcgtggttgttgatctagatttaggtcgtgaagatgggctcgagatcgttcgtaatctggcggcaaagtctgatattccaatcataattatcagtggcgaccgccttgaggagacggataaagttgttgcactcgagctaggagcaagtgattttatcgctaagccgttcagtatcagagagtttctagcacgcattcgggttgccttgcgcgtgcgccccaacgttgtccgctccaaagaccgacggtctttttgttttactgactggacacttaatctcaggcaacgtcgcttgatgtccgaagctggcggtgaggtgaaacttacggcaggtgagttcaatcttctcctcgcgtttttagagaaaccccgcgacgttctatcgcgcgagcaacttctcattgccagtcgagtacgcgacgaggaggtttatgacaggagtatagatgttctcattttgaggctgcgccgcaaacttgaggcagatccgtcaagccctcaactgataaaaacagcaagaggtgccggttatttctttgacgcggacgtgcaggtttcgcacggggggacgatggcagcctgagccaattcccagatccccgaggaatcggcgtgagcggtcgcaaaccatccggcccggtacaaatcggcgcggcgctgggtgatgacctggtggagaagttgaaggccgcgcaggccgcccagcggcaacgcatcgaggcagaagcacgccccggtgaatcgtggcaagcggccgctgatcgaatccgcaaagaatcccggcaaccgccggcagccggtgcgccgtcgattaggaagccgcccaagggcgacgagcaaccagattttttcgttccgatgctctatgacgtgggcacccgcgatagtcgcagcatcatggacgtggccgttttccgtctgtcgaagcgtgaccgacgagctggcgaggtgatccgctacgagcttccagacgggcacgtagaggtttccgcagggccggccggcatggccagtgtgtgggattacgacctggtactgatggcggtttcccatctaaccgaatccatgaaccgataccgggaagggaagggagacaagcccggccgcgtgttccgtccacacgttgcggacgtactcaagttctgccggcgagccgatggcggaaagcagaaagacgacctggtagaaacctgcattcggttaaacaccacgcacgttgccatgcagcgtacgaagaaggccaagaacggccgcctggtgacggtatccgagggtgaagccttgattagccgctacaagatcgtaaagagcgaaaccgggcggccggagtacatcgagatcgagctggctgattggatgtaccgcgagatcacagaaggcaagaacccggacgtgctgacggttcaccccgattactttttgatcgatcccggcatcggccgttttctctaccgcctggcacgccgcgccgcaggcaaggcagaagccagatggttgttcaagacgatctacgaacgcagtggcagcgccggagagttcaagaagttctgtttcaccgtgcgcaagctgatcgggtcaaatgacctgccggagtacgatttgaaggaggaggcggggcaggctggcccgatcctagtcatgcgctaccgcaacctgatcgagggcgaagcatccgccggttcctaatgtacggagcagatgctagggcaaattgccctagcaggggaaaaaggtcgaaaaggtctctttcctgtggatagcacgtacattgggaacccaaagccgtacattgggaaccggaacccgtacattgggaacccaaagccgtacattgggaaccggtcacacatgtaagtgactgatataaaagagaaaaaaggcgatttttccgcctaaaactctttaaaacttattaaaactcttaaaacccgcctggcctgtgcataactgtctggccagcgcacagccgaagagctgcaaaaagcgcctacccttcggtcgctgcgctccctacgccccgccgcttcgcgtcggcctatcgcggccgctggccgctcaaaaatggctggcctacggccaggcaatctaccagggcgcggacaagccgcgccgtcgccactcgaccgccggcgctgaggtctgcctcgtgaagaaggtgttgctgactcataccaggcctgaatcgccccatcatccagccagaaagtgagggagccacggttgatgagagctttgttgtaggtggaccagttggtgattttgaacttttgctttgccacggaacggtctgcgttgtcgggaagatgcgtgatctgatccttcaactcagcaaaagttcgatttattcaacaaagccgccgtcccgtcaagtcagcgtaatgctctgccagtgttacaaccaattaaccaattctgattagaaaaactcatcgagcatcaaatgaaactgcaatttattcatatcaggattatcaataccatatttttgaaaaagccgtttctgtaatgaaggagaaaactcaccgaggcagttccataggatggcaagatcctggtatcggtctgcgattccgactcgtccaacatcaatacaacctattaatttcccctcgtcaaaaataaggttatcaagtgagaaatcaccatgagtgacgactgaatccggtgagaatggcaaaagctctgcattaatgaatcggccaacgcgcggggagaggcggtttgcgtattgggcgctcttccgcttcctcgctcactgactcgctgcgctcggtcgttcggctgcggcgagcggtatcagctcactcaaaggcggtaatacggttatccacagaatcaggggataacgcaggaaagaacatgtgagcaaaaggccagcaaaaggccaggaaccgtaaaaaggccgcgttgctggcgtttttccataggctccgcccccctgacgagcatcacaaaaatcgacgctcaagtcagaggtggcgaaacccgacaggactataaagataccaggcgtttccccctggaagctccctcgtgcgctctcctgttccgaccctgccgcttaccggatacctgtccgcctttctcccttcgggaagcgtggcgctttctcatagctcacgctgtaggtatctcagttcggtgtaggtcgttcgctccaagctgggctgtgtgcacgaaccccccgttcagcccgaccgctgcgccttatccggtaactatcgtcttgagtccaacccggtaagacacgacttatcgccactggcagcagccactggtaacaggattagcagagcgaggtatgtaggcggtgctacagagttcttgaagtggtggcctaactacggctacactagaagaacagtatttggtatctgcgctctgctgaagccagttaccttcggaaaaagagttggtagctcttgatccggcaaacaaaccaccgctggtagcggtggtttttttgtttgcaagcagcagattacgcgcagaaaaaaaggatctcaagaagatcctttgatcttttctacggggtctgacgctcagtggaacgaaaactcacgttaagggattttggtcatgagattatcaaaaaggatcttcacctagatccttttgatccggaatta

SEQ ID NO: 56 - DNA, 17531 bp, synthetic construct
  source 1..17531: mol_type = other DNA
attcctgtggttggcatgcacatacaaatggacgaacggataaaccttttcacgcccttttaaatatccgattattctaataaacgctcttttctcttaggtttacccgccaatatatcctgtcaaacactgatagtttaaactggcactagcctaacggtgttgactaactaggccgcttccctaattagctaacccgggggcgcgccgggaccggaattcattatgtggtctaggtaggttctatatataagaaaacttgaaatgttctaaaaaaaaattcaagcccatgcatgattgaagcaaacggtatagcaacggtgttaacctgatctagtgatctcttgcaatccttaacggccacctaccgcaggtagcaaacggcgtccccctcctcgatatctccgcggcgacctctggctttttccgcggaattgcgcggtggggacggattccacgagaccgcgacgcaaccgcctctcgccgctgggccccacaccgctcggtgccgtagcctcacgggactctttctccctcctcccccgttataaattggcttcatcccctccttgcctcatccatccaaatcccagtccccaatcccatcccttcgtaggagaaattcatcgaagctaagcgaatcctcgcgatcctctcaaggtactgcgagttttcgatccccctctcgacccctcgtatgtttgtgtttgtcgtagcgtttgattaggtatgctttccctgtttgtgttcgtcgtagcgtttgattaggtatgctttccctgttcgtgttcatcgtagtgtttgattaggtcgtgtgaggcgatggcctgctcgcgtccttcgatctgtagtcgatttgcgggtcgtggtgtagatctgcgggctgtgatgaagttatttggtgtgatctgctcgcctgattctgcgggttggctcgagtagatatgatggttggaccggttggttcgtttaccgcgctagggttgggctgggatgatgttgcatgcgccgttgcgcgtgatcccgcagcaggacttgcgtttgattgccagatctcgttacgattatgtgatttggtttggactttttagatctgtagcttctgcttatgtgccagatgcgcctactgctcatatgcctgatgataatcataaatggctgtggaactaactagttgattgcggagtcatgtatcagctacaggtgtagggactagctacaggtgtagggacttgcgtctaattgtttggtcctttactcatgttgcaattatgcaatttagtttagattgtttgttccactcatctaggctgtaaaagggacactgcttagattgctgtttaatctttttagtagattatattatattggtaacttattacccctattacatgccatacgtgacttctgctcatgcctgatgataatcatagatcactgtggaattaattagttgattgttgaatcatgtttcatgtacataccacggcacaattgcttagttccttaacaaatgcaaattttactgatccatgtatgatttgcgtggttctctaatgtgaaatactatagctacttgttagtaagaatcaggttcgtatgcttaatgctgtatgtgccttctgctcatgcctgatgataatcatatatcactggaattaattagttgatcgtttaatcatatatcaagtacataccatgccacaatttttagtcacttaacccatgcagattgaactggtccctgcatgttttgctaaattgttctattctgattagaccatatatcatgtatttttttttggtaatggttctcttattttaaatgctatatagttctggtacttgttagaaagatctgcttcatagtttagttgcctatccctcgaattaggatgctgagcagctgatcctatagctttgtttcatgtatcaattcttttgtgttcaacagtcagtttttgttagattcattgtaacttatggtcgcttactcttctggtcctcaatgcttgcagggatcccctaaatagaccatgccgaagaagaagcgcaaggtcgggggcgggggctcaggcgggggcgggagcggcggcgggggctctgggggcggcggcagcggcgggggcggcagcgggggcggcgggtcgatgctgttccaggatttcactcatctgtaccctctctcaaagactgttcggttcgagctcaagcctattgggcggactctggagcacatccacgcgaagaacttcctcagccaggacgaaaccatggccgacatgtaccagaaggtcaaggtcatcctcgacgactaccacagggacttcatcgcggacatgatgggcgaggtgaagctgacgaagctcgccgagttctacgacgtctacctcaagttccgcaagaacccgaaggacgacggcctccagaagcagctcaaggacctgcaggccgtcctgaggaaggagtccgtcaagcccatcggcagcggcggcaagtacaagaccggctacgacaggctgttcggcgccaagctgttcaaggacggcaaggagctcggcgacctggcgaagttcgtgatcgcgcaggagggcgagagctcccccaagctggcccacctggcccacttcgagaagttcagcacgtacttcaccggcttccacgacaacaggaagaacatgtacagcgacgaggacaagcacacggccatcgcctaccgcctcatccacgagaacctgccccgcttcatcgacaacctgcagatcctgacgaccatcaagcagaagcactccgccctgtacgaccagatcatcaacgagctcaccgcgagcggcctcgacgtgtccctcgccagccacctcgacggctaccacaagctcctgacccaggagggcatcaccgcctacaaccgcatcatcggcgaggtgaacggctacaccaacaagcacaaccagatctgccacaagtccgagaggatcgccaagctcaggcccctgcacaagcagatcctcagcgacggcatgggcgtgagcttcctcccgtccaagttcgccgacgactccgagatgtgccaggccgtgaacgagttctacaggcactacaccgacgtgttcgccaaggtgcagtccctgttcgacggcttcgacgaccaccagaaggacggcatctacgtggagcacaagaacctgaacgagctgtccaagcaggccttcggcgacttcgccctcctgggccgcgtgctggacggctactacgtggacgtcgtgaacccggagttcaacgagcgcttcgcgaaggcgaagacggacaacgcgaaggccaagctcaccaaggagaaggacaagttcatcaagggcgtccacagcctcgcgtccctggagcaggcgatcgagcaccacaccgcgcgccacgacgacgagtccgtgcaggccggcaagctcggccagtacttcaagcacggcctggccggcgtcgacaacccgatccagaagatccacaacaaccactccaccatcaagggcttcctggagagggagcgcccggcgggcgagcgcgcgctccccaagatcaagtccggcaagaaccccgagatgacgcagctcaggcagctgaaggagctgctcgacaacgcgctcaacgtggcgcacttcgccaagctgctcacgaccaagaccacgctggacaaccaggacggcaacttctacggcgagttcggcgtcctgtacgacgagctggcgaagatcccgaccctgtacaacaaggtccgcgactacctgagccagaagcccttctccaccgagaagtacaagctcaacttcggcaacccgaccctcctgaacggctgggacctcaacaaggagaaggacaacttcggcgtgatcctccagaaggacggctgctactacctcgccctgctggacaaggcgcacaagaaggtcttcgacaacgccccgaacaccggcaagaacgtgtaccagaagatggtgtacaagctgctccccggccccaacaagatgctgccgaaggtgttcttcgcgaagtccaacctcgactactacaaccccagcgccgagctcctggacaagtacgccaagggcacgcacaagaagggcgacaacttcaacctcaaggactgccacgcgctgatcgacttcttcaaggcgggcatcaacaagcaccccgagtggcagcacttcggcttcaagttcagcccgacctccagctacagggacctcagcgacttctaccgcgaggtggagccccagggctaccaggtgaagttcgtcgacatcaacgccgactacatcgacgagctcgtcgagcagggcaagctctacctgttccagatctacaacaaggacttctccccgaaggcccacggcaagccgaacctccacacgctctacttcaaggccctcttcagcgaggacaacctggccgacccgatctacaagctcaacggcgaggcgcagatcttctaccgcaaggccagcctggacatgaacgaaacgaccatccacagggccggcgaggtcctggagaacaagaacccggacaacccgaagaagaggcagttcgtctacgacatcatcaaggacaagaggtacacccaggacaagttcatgctccacgtcccgatcaccatgaacttcggcgtccagggcatgaccatcaaggagttcaacaagaaggtcaaccagagcatccagcagtacgacgaggtgaacgtcatcggcatcgaccgcggcgagaggcacctgctctacctgacggtcatcaactccaagggcgagatcctcgagcagcgcagcctgaacgacatcacgaccgcgagcgccaacggcacgcaggtcaccacgccgtaccacaagatcctcgacaagcgcgagatcgagagggtgaaggcgcgcgtcggctggggcgagatcgaaacgatcaaggagctcaagtccggctacctcagccacgtcgtgcaccagatcaaccagctcatgctgaagtacaacgcgatcgtggtcctcgaggacctgaacttcggcttcaagaggggccgcttcaaggtggagaagcagatctaccagaacttcgagaacgccctgatcaagaagctcaaccacctggtcctcaaggacaaggcggacgacgagatcggcagctacaagaacgcgctccagctgaccaacaacttcacggacctcaagtccatcggcaagcagacgggcttcctgttctacgtgccggcgtggaacacctccaagatcgacccggaaaccggcttcgtcgacctgctcaagccgcgctacgagaacatcgcgcagtcccaggcgttcttcggcaagttcgacaagatctgctacaacaccgacaagggctacttcgagttccacatcgactacgcgaagttcaccgacaaggccaagaactccaggcagaagtgggccatctgcagccacggcgacaagcgctacgtgtacgacaagacggcgaaccagaacaagggcgcggccaagggcatcaacgtgaacgacgagctgaagtccctcttcgcgcgctaccacatcaacgacaagcagccgaacctcgtcatggacatctgccagaacaacgacaaggagttccacaagagcctgatgtgcctgctcaagaccctgctcgccctccgctactccaacgcgagctccgacgaggacttcatcctcagccccgtcgcgaacgacgagggcgtgttcttcaactccgccctcgcggacgacacgcagccgcagaacgccgacgcgaacggcgcctaccacatcgccctcaagggcctgtggctgctcaacgagctcaagaactccgacgacctgaacaaggtgaagctcgccattgacaaccagacgtggctgaatttcgctcagaatagggggggcgggggctcaggcgggggcgggagcggcggcgggggctctgggggcggcggcagcggcgggggcggcagcgggggcggcgggtcgccgaagaagaagcgcaaggtgtccggcggcagctccggcggcagcccgaagaagaagcgcaaagtgtgagggacccgatcgttcaaacatttggcaataaagtttcttaagattgaatcctgttgccggtcttgcgatgattatcatataatttctgttgaattacgttaagcatgtaataattaacatgtaatgcatgacgttatttatgagatgggtttttatgattagagtcccgcaattatacatttaatacgcgatagaaaacaaaatatagcgcgcaaactaggataaattatcgcgcgcggtgtcatctatgttactagatcggtaccgaattcattatgtggtctaggtaggttctatatataagaaaacttgaaatgttctaaaaaaaaattcaagcccatgcatgattgaagcaaacggtatagcaacggtgttaacctgatctagtgatctcttgcaatccttaacggccacctaccgcaggtagcaaacggcgtccccctcctcgatatctccgcggcgacctctggctttttccgcggaattgcgcggtggggacggattccacgagaccgcgacgcaaccgcctctcgccgctgggccccacaccgctcggtgccgtagcctcacgggactctttctccctcctcccccgttataaattggcttcatcccctccttgcctcatccatccaaatcccagtccccaatcccatcccttcgtaggagaaattcatcgaagctaagcgaatcctcgcgatcctctcaaggtactgcgagttttcgatccccctctcgacccctcgtatgtttgtgtttgtcgtagcgtttgattaggtatgctttccctgtttgtgttcgtcgtagcgtttgattaggtatgctttccctgttcgtgttcatcgtagtgtttgattaggtcgtgtgaggcgatggcctgctcgcgtccttcgatctgtagtcgatttgcgggtcgtggtgtagatctgcgggctgtgatgaagttatttggtgtgatctgctcgcctgattctgcgggttggctcgagtagatatgatggttggaccggttggttcgtttaccgcgctagggttgggctgggatgatgttgcatgcgccgttgcgcgtgatcccgcagcaggacttgcgtttgattgccagatctcgttacgattatgtgatttggtttggactttttagatctgtagcttctgcttatgtgccagatgcgcctactgctcatatgcctgatgataatcataaatggctgtggaactaactagttgattgcggagtcatgtatcagctacaggtgtagggactagctacaggtgtagggacttgcgtctaattgtttggtcctttactcatgttgcaattatgcaatttagtttagattgtttgttccactcatctaggctgtaaaagggacactgcttagattgctgtttaatctttttagtagattatattatattggtaacttattacccctattacatgccatacgtgacttctgctcatgcctgatgataatcatagatcactgtggaattaattagttgattgttgaatcatgtttcatgtacataccacggcacaattgcttagttccttaacaaatgcaaattttactgatccatgtatgatttgcgtggttctctaatgtgaaatactatagctacttgttagtaagaatcaggttcgtatgcttaatgctgtatgtgccttctgctcatgcctgatgataatcatatatcactggaattaattagttgatcgtttaatcatatatcaagtacataccatgccacaatttttagtcacttaacccatgcagattgaactggtccctgcatgttttgctaaattgttctattctgattagaccatatatcatgtatttttttttggtaatggttctcttattttaaatgctatatagttctggtacttgttagaaagatctgcttcatagtttagttgcctatccctcgaattaggatgctgagcagctgatcctatagctttgtttcatgtatcaattcttttgtgttcaacagtcagtttttgttagattcattgtaacttatggtcgcttactcttctggtcctcaatgcttgcagaagcttgaaattctgatgagtccgtgaggacgaaacgagtaagctcgtcaatttctactgtttgtagatgggaaagaccgaggagaagatctaatttctactgtttgtagatgcaccaaggaaggggaggagatcaatttctactgtttgtagatgtcacagatcacaaacttcaaatgaatttctactgtttgtagatacgcccagaaagcatacgcagtcggccggcatggtcccagcctcctcgctggcgccggctgggcaacatgcttcggcatggcgaatgggacgatcgttcaaacatttggcaataaagtttcttaagattgaatcctgttgccggtcttgcgatgattatcatataatttctgttgaattacgttaagcatgtaataattaacatgtaatgcatgacgttatttatgagatgggtttttatgattagagtcccgcaattatacatttaatacgcgatagaaaacaaaatatagcgcgcaaactaggataaattatcgcgcgcggtgtcatctatgttactagatccctaggctgcagtgcagcgtgacccggtcgtgcccctctctagagataatgagcattgcatgtctaagttataaaaaattaccacatattttttttgtcacacttgtttgaagtgcagtttatctatctttatacatatatttaaactttactctacgaataatataatctatagtactacaataatatcagtgttttagagaatcatataaatgaacagttagacatggtctaaaggacaattgagtattttgacaacaggactctacagttttatctttttagtgtgcatgtgttctcctttttttttgcaaatagcttcacctatataatacttcatccattttattagtacatccatttagggtttagggttaatggtttttatagactaatttttttagtacatctattttattctattttagcctctaaattaagaaaactaaaactctattttagtttttttatttaataatttagatataaaatagaataaaataaagtgactaaaaattaaacaaataccctttaagaaattaaaaaaactaaggaaacatttttcttgtttcgagtagataatgccagcctgttaaacgccgtcgacgagtctaacggacaccaaccagcgaaccagcagcgtcgcgtcgggccaagcgaagcagacggcacggcatctctgtcgctgcctctggacccctctcgagagttccgctccaccgttggacttgctccgctgtcggcatccagaaattgcgtggcggagcggcagacgtgagccggcacggcaggcggcctcctcctcctctcacggcaccggcagctacgggggattcctttcccaccgctccttcgctttcccttcctcgcccgccgtaataaatagacaccccctccacaccctctttccccaacctcgtgttgttcggagcgcacacacacacaaccagatctcccccaaatccacccgtcggcacctccgcttcaaggtacgccgctcgtcctccccccccccccctctctaccttctctagatcggcgttccggtccatggttagggcccggtagttctacttctgttcatgtttgtgttagatccgtgtttgtgttagatccgtgctgctagcgttcgtacacggatgcgacctgtacgtcagacacgttctgattgctaacttgccagtgtttctctttggggaatcctgggatggctctagccgttccgcagacgggatcgatttcatgattttttttgtttcgttgcatagggtttggtttgcccttttcctttatttcaatatatgccgtgcacttgtttgtcgggtcatcttttcatgcttttttttgtcttggttgtgatgatgtggtctggttgggcggtcgttctagatcggagtagaattctgtttcaaactacctggtggatttattaattttggatctgtatgtgtgtgccatacatattcatagttacgaattgaagatgatggatggaaatatcgatctaggataggtatacatgttgatgcgggttttactgatgcatatacagagatgctttttgttcgcttggttgtgatgatgtggtgtggttgggcggtcgttcattcgttctagatcggagtagaatactgtttcaaactacctggtgtatttattaattttggaactgtatgtgtgtgtcatacatcttcatagttacgagtttaagatggatggaaatatcgatctaggataggtatacatgttgatgtgggttttactgatgcatatacatgatggcatatgcagcatctattcatatgctctaaccttgagtacctatctattataataaacaagtatgttttataattattttgatcttgatatacttggatgatggcatatgcagcagctatatgtggatttttttagccctgccttcatacgctatttatttgcttggtactgtttcttttgtcgatgctcaccctgttgtttggtgttacttctgcagggatcaccgatcatgcaaaaactcattaactcagtgcaaaactatgcctggggcagcaaaacggcgttgactgaactttatggtatggaaaatccgtccagccagccgatggccgagctgtggatgggcgcacatccgaaaagcagttcacgagtgcagaatgccgccggagatatcgtttcactgcgtgatgtgattgagagtgataaatcgactctgctcggagaggccgttgccaaacgctttggcgaactgcctttcctgttcaaagtattatgcgcagcacagccactctccattcaggttcatccaaacaaacacaattctgaaatcggttttgccaaagaaaatgccgcaggtatcccgatggatgccgccgagcgtaactataaagatcctaaccacaagccggagctggtttttgcgctgacgcctttccttgcgatgaacgcgtttcgtgaattttccgagattgtctccctactccagccggtcgcaggtgcacatccggcgattgctcactttttacaacagcctgatgccgaacgtttaagcgaactgttcgccagcctgttgaatatgcagggtgaagaaaaatcccgcgcgctggcgattttaaaatcggccctcgatagccagcagggtgaaccgtggcaaacgattcgtttaatttctgaattttacccggaagacagcggtctgttctccccgctattgctgaatgtggtgaaattgaaccctggcgaagcgatgttcctgttcgctgaaacaccgcacgcttacctgcaaggcgtggcgctggaagtgatggcaaactccgataacgtgctgcgtgcgggtctgacgcctaaatacattgatattccggaactggttgccaatgtgaaattcgaagccaaaccggctaaccagttgttgacccagccggtgaaacaaggtgcagaactggacttcccgattccagtggatgattttgccttctcgctgcatgaccttagtgataaagaaaccaccattagccagcagagtgccgccattttgttctgcgtcgaaggcgatgcaacgttgtggaaaggttctcagcagttacagcttaaaccgggtgaatcagcgtttattgccgccaacgaatcaccggtgactgtcaaaggccacggccgtttagcgcgtgtttacaacaagctgtaagagcttactgaaaaaattaacatctcttgctaagctgggagctcgatccgtcgacctgcagatcgttcaaacatttggcaataaagtttcttaagattgaatcctgttgccggtcttgcgatgattatcatataatttctgttgaattacgttaagcatgtaataattaacatgtaatgcatgacgttatttatgagatgggtttttatgattagagtcccgcaattatacatttaatacgcgatagaaaacaaaatatagcgcgcaaactaggataaattatcgcgcgcggtgtcatctatgttactagatccggaccgcctgcaggcccgggggcgcgccctaattagctaacggccaggatcgccgcgtgagcctttagcaactagctagattaattaacgcaatctgttattaagttgtctaagcgtcaatttgtttacaccacaatatatcctgccaccagccagccaacagctccccgaccggcagctcggcacaaaatcaccactcgatacaggcagcccatcagaattaattctcatgtttgacagcttatcatcgactgcacggtgcaccaatgcttctggcgtcaggcagccatcggaagctgtggtatggctgtgcaggtcgtaaatcactgcataattcgtgtcgctcaaggcgcactcccgttctggataatgttttttgcgccgacatcataacggttctggcaaatattctgaaatgagctgttgacaattaatcatccggctcgtataatgtgtggaattgtgagcggataacaatttcacacaggaaacagaccatgagggaagcgttgatcgccgaagtatcgactcaactatcagaggtagttggcgtcatcgagcgccatctcgaaccgacgttgctggccgtacatttgtacggctccgcagtggatggcggcctgaagccacacagtgatattgatttgctggttacggtgaccgtaaggcttgatgaaacaacgcggcgagctttgatcaacgaccttttggaaacttcggcttcccctggagagagcgagattctccgcgctgtagaagtcaccattgttgtgcacgacgacatcattccgtggcgttatccagctaagcgcgaactgcaatttggagaatggcagcgcaatgacattcttgcaggtatcttcgagccagccacgatcgacattgatctggctatcttgctgacaaaagcaagagaacatagcgttgccttggtaggtccagcggcggaggaactctttgatccggttcctgaacaggatctatttgaggcgctaaatgaaaccttaacgctatggaactcgccgcccgactgggctggcgatgagcgaaatgtagtgcttacgttgtcccgcatttggtacagcgcagtaaccggcaaaatcgcgccgaaggatgtcgctgccgactgggcaatggagcgcctgccggcccagtatcagcccgtcatacttgaagctaggcaggcttatcttggacaagaagatcgcttggcctcgcgcgcagatcagttggaagaatttgttcactacgtgaaaggcgagatcaccaaagtagtcggcaaataaagctctagtggatctccgtacccagggatctggctcgcggcggacgcacgacgccggggcgagaccataggcgatctcctaaatcaatagtagctgtaacctcgaagcgtttcacttgtaacaacgattgagaatttttgtcataaaattgaaatacttggttcgcatttttgtcatccgcggtcagccgcaattctgacgaactgcccatttagctggagatgattgtacatccttcacgtgaaaatttctcaagcgctgtgaacaagggttcagattttagattgaaaggtgagccgttgaaacacgttcttcttgtcgatgacgacgtcgctatgcggcatcttattattgaataccttacgatccacgccttcaaagtgaccgcggtagccgacagcacccagttcacaagagtactctcttccgcgacggtcgatgtcgtggttgttgatctagatttaggtcgtgaagatgggctcgagatcgttcgtaatctggcggcaaagtctgatattccaatcataattatcagtggcgaccgccttgaggagacggataaagttgttgcactcgagctaggagcaagtgattttatcgctaagccgttcagtatcagagagtttctagcacgcattcgggttgccttgcgcgtgcgccccaacgttgtccgctccaaagaccgacggtctttttgttttactgactggacacttaatctcaggcaacgtcgcttgatgtccgaagctggcggtgaggtgaaacttacggcaggtgagttcaatcttctcctcgcgtttttagagaaaccccgcgacgttctatcgcgcgagcaacttctcattgccagtcgagtacgcgacgaggaggtttatgacaggagtatagatgttctcattttgaggctgcgccgcaaacttgaggcagatccgtcaagccctcaactgataaaaacagcaagaggtgccggttatttctttgacgcggacgtgcaggtttcgcacggggggacgatggcagcctgagccaattcccagatccccgaggaatcggcgtgagcggtcgcaaaccatccggcccggtacaaatcggcgcggcgctgggtgatgacctggtggagaagttgaaggccgcgcaggccgcccagcggcaacgcatcgaggcagaagcacgccccggtgaatcgtggcaagcggccgctgatcgaatccgcaaagaatcccggcaaccgccggcagccggtgcgccgtcgattaggaagccgcccaagggcgacgagcaaccagattttttcgttccgatgctctatgacgtgggcacccgcgatagtcgcagcatcatggacgtggccgttttccgtctgtcgaagcgtgaccgacgagctggcgaggtgatccgctacgagcttccagacgggcacgtagaggtttccgcagggccggccggcatggccagtgtgtgggattacgacctggtactgatggcggtttcccatctaaccgaatccatgaaccgataccgggaagggaagggagacaagcccggccgcgtgttccgtccacacgttgcggacgtactcaagttctgccggcgagccgatggcggaaagcagaaagacgacctggtagaaacctgcattcggttaaacaccacgcacgttgccatgcagcgtacgaagaaggccaagaacggccgcctggtgacggtatccgagggtgaagccttgattagccgctacaagatcgtaaagagcgaaaccgggcggccggagtacatcgagatcgagctggctgattggatgtaccgcgagatcacagaaggcaagaacccggacgtgctgacggttcaccccgattactttttgatcgatcccggcatcggccgttttctctaccgcctggcacgccgcgccgcaggcaaggcagaagccagatggttgttcaagacgatctacgaacgcagtggcagcgccggagagttcaagaagttctgtttcaccgtgcgcaagctgatcgggtcaaatgacctgccggagtacgatttgaaggaggaggcggggcaggctggcccgatcctagtcatgcgctaccgcaacctgatcgagggcgaagcatccgccggttcctaatgtacggagcagatgctagggcaaattgccctagcaggggaaaaaggtcgaaaaggtctctttcctgtggatagcacgtacattgggaacccaaagccgtacattgggaaccggaacccgtacattgggaacccaaagccgtacattgggaaccggtcacacatgtaagtgactgatataaaagagaaaaaaggcgatttttccgcctaaaactctttaaaacttattaaaactcttaaaacccgcctggcctgtgcataactgtctggccagcgcacagccgaagagctgcaaaaagcgcctacccttcggtcgctgcgctccctacgccccgccgcttcgcgtcggcctatcgcggccgctggccgctcaaaaatggctggcctacggccaggcaatctaccagggcgcggacaagccgcgccgtcgccactcgaccgccggcgctgaggtctgcctcgtgaagaaggtgttgctgactcataccaggcctgaatcgccccatcatccagccagaaagtgagggagccacggttgatgagagctttgttgtaggtggaccagttggtgattttgaacttttgctttgccacggaacggtctgcgttgtcgggaagatgcgtgatctgatccttcaactcagcaaaagttcgatttattcaacaaagccgccgtcccgtcaagtcagcgtaatgctctgccagtgttacaaccaattaaccaattctgattagaaaaactcatcgagcatcaaatgaaactgcaatttattcatatcaggattatcaataccatatttttgaaaaagccgtttctgtaatgaaggagaaaactcaccgaggcagttccataggatggcaagatcctggtatcggtctgcgattccgactcgtccaacatcaatacaacctattaatttcccctcgtcaaaaataaggttatcaagtgagaaatcaccatgagtgacgactgaatccggtgagaatggcaaaagctctgcattaatgaatcggccaacgcgcggggagaggcggtttgcgtattgggcgctcttccgcttcctcgctcactgactcgctgcgctcggtcgttcggctgcggcgagcggtatcagctcactcaaaggcggtaatacggttatccacagaatcaggggataacgcaggaaagaacatgtgagcaaaaggccagcaaaaggccaggaaccgtaaaaaggccgcgttgctggcgtttttccataggctccgcccccctgacgagcatcacaaaaatcgacgctcaagtcagaggtggcgaaacccgacaggactataaagataccaggcgtttccccctggaagctccctcgtgcgctctcctgttccgaccctgccgcttaccggatacctgtccgcctttctcccttcgggaagcgtggcgctttctcatagctcacgctgtaggtatctcagttcggtgtaggtcgttcgctccaagctgggctgtgtgcacgaaccccccgttcagcccgaccgctgcgccttatccggtaactatcgtcttgagtccaacccggtaagacacgacttatcgccactggcagcagccactggtaacaggattagcagagcgaggtatgtaggcggtgctacagagttcttgaagtggtggcctaactacggctacactagaagaacagtatttggtatctgcgctctgctgaagccagttaccttcggaaaaagagttggtagctcttgatccggcaaacaaaccaccgctggtagcggtggtttttttgtttgcaagcagcagattacgcgcagaaaaaaaggatctcaagaagatcctttgatcttttctacggggtctgacgctcagtggaacgaaaactcacgttaagggattttggtcatgagattatcaaaaaggatcttcacctagatccttttgatccggaatta

SEQ ID NO: 57 - protein, 1341 aa, synthetic construct
MPKKKRKVGGGGSGGGGSGGGGSGGGGSGGGGSGGGGSMLFQDFTHLYPLSKTVRFELKPIGRTLEHIHAKNFLSQDETMADMYQKVKVILDDYHRDFIADMMGEVKLTKLAEFYDVYLKFRKNPKDDGLQKQLKDLQAVLRKESVKPIGSGGKYKTGYDRLFGAKLFKDGKELGDLAKFVIAQEGESSPKLAHLAHFEKFSTYFTGFHDNRKNMYSDEDKHTAIAYRLIHENLPRFIDNLQILTTIKQKHSALYDQIINELTASGLDVSLASHLDGYHKLLTQEGITAYNRIIGEVNGYTNKHNQICHKSERIAKLRPLHKQILSDGMGVSFLPSKFADDSEMCQAVNEFYRHYTDVFAKVQSLFDGFDDHQKDGIYVEHKNLNELSKQAFGDFALLGRVLDGYYVDVVNPEFNERFAKAKTDNAKAKLTKEKDKFIKGVHSLASLEQAIEHHTARHDDESVQAGKLGQYFKHGLAGVDNPIQKIHNNHSTIKGFLERERPAGERALPKIKSGKNPEMTQLRQLKELLDNALNVAHFAKLLTTKTTLDNQDGNFYGEFGVLYDELAKIPTLYNKVRDYLSQKPFSTEKYKLNFGNPTLLNGWDLNKEKDNFGVILQKDGCYYLALLDKAHKKVFDNAPNTGKNVYQKMVYKLLPGPNKMLPKVFFAKSNLDYYNPSAELLDKYAKGTHKKGDNFNLKDCHALIDFFKAGINKHPEWQHFGFKFSPTSSYRDLSDFYREVEPQGYQVKFVDINADYIDELVEQGKLYLFQIYNKDFSPKAHGKPNLHTLYFKALFSEDNLADPIYKLNGEAQIFYRKASLDMNETTIHRAGEVLENKNPDNPKKRQFVYDIIKDKRYTQDKFMLHVPITMNFGVQGMTIKEFNKKVNQSIQQYDEVNVIGIDRGERHLLYLTVINSKGEILEQRSLNDITTASANGTQVTTPYHKILDKREIERLNARQGWGEIETIKELKSGYLSHVVHQINQLMLKYNAIVVLEDLNFGFKRGRFKVEKQIYQNFENALIKKLNHLVLKDKADDEIGSYKNALQLTNNFTDLKSIGKQTGFLFYVPAWNTSKIDPETGFVDLLKPRYENIAQSQAFFGKFDKICYNTDKGYFEFHIDYAKFTDKAKNSRQKWAICSHGDKRYVYDKTANQNKGAAKGINVNDELKSLFARYHINDKQPNLVMDICQNNDKEFHKSLMCLLKTLLALRYSNASSDEDFILSPVANDEGVFFNSALADDTQPQNADANGAYHIALKGLWLLNELKNSDDLNKVKLAIDNQTWLNFAQNRGGGGSGGGGSGGGGSGGGGSGGGGSGGGGSPKKKRKVSGGSSGGSPKKKRKV

SEQ ID NO: 58 - protein, 1341 aa, synthetic construct
MPKKKRKVGGGGSGGGGSGGGGSGGGGSGGGGSGGGGSMLFQDFTHLYPLSKTVRFELKPIGRTLEHIHAKNFLSQDETMADMYQKVKVILDDYHRDFIADMMGEVKLTKLAEFYDVYLKFRKNPKDDGLQKQLKDLQAVLRKESVKPIGSGGKYKTGYDRLFGAKLFKDGKELGDLAKFVIAQEGESSPKLAHLAHFEKFSTYFTGFHDNRKNMYSDEDKHTAIAYRLIHENLPRFIDNLQILTTIKQKHSALYDQIINELTASGLDVSLASHLDGYHKLLTQEGITAYNRIIGEVNGYTNKHNQICHKSERIAKLRPLHKQILSDGMGVSFLPSKFADDSEMCQAVNEFYRHYTDVFAKVQSLFDGFDDHQKDGIYVEHKNLNELSKQAFGDFALLGRVLDGYYVDVVNPEFNERFAKAKTDNAKAKLTKEKDKFIKGVHSLASLEQAIEHHTARHDDESVQAGKLGQYFKHGLAGVDNPIQKIHNNHSTIKGFLERERPAGERALPKIKSGKNPEMTQLRQLKELLDNALNVAHFAKLLTTKTTLDNQDGNFYGEFGVLYDELAKIPTLYNKVRDYLSQKPFSTEKYKLNFGNPTLLNGWDLNKEKDNFGVILQKDGCYYLALLDKAHKKVFDNAPNTGKNVYQKMVYKLLPGPNKMLPKVFFAKSNLDYYNPSAELLDKYAKGTHKKGDNFNLKDCHALIDFFKAGINKHPEWQHFGFKFSPTSSYRDLSDFYREVEPQGYQVKFVDINADYIDELVEQGKLYLFQIYNKDFSPKAHGKPNLHTLYFKALFSEDNLADPIYKLNGEAQIFYRKASLDMNETTIHRAGEVLENKNPDNPKKRQFVYDIIKDKRYTQDKFMLHVPITMNFGVQGMTIKEFNKKVNQSIQQYDEVNVIGIDRGERHLLYLTVINSKGEILEQRSLNDITTASANGTQVTTPYHKILDKREIERLNARKGWGEIETIKELKSGYLSHVVHQINQLMLKYNAIVVLEDLNFGFKRGRFKVEKQIYQNFENALIKKLNHLVLKDKADDEIGSYKNALQLTNNFTDLKSIGKQTGFLFYVPAWNTSKIDPETGFVDLLKPRYENIAQSQAFFGKFDKICYNTDKGYFEFHIDYAKFTDKAKNSRQKWAICSHGDKRYVYDKTANQNKGAAKGINVNDELKSLFARYHINDKQPNLVMDICQNNDKEFHKSLMCLLKTLLALRYSNASSDEDFILSPVANDEGVFFNSALADDTQPQNADANGAYHIALKGLWLLNELKNSDDLNKVKLAIDNQTWLNFAQNRGGGGSGGGGSGGGGSGGGGSGGGGSGGGGSPKKKRKVSGGSSGGSPKKKRKV

SEQ ID NO: 59 - protein, 1341 aa, synthetic construct
MPKKKRKVGGGGSGGGGSGGGGSGGGGSGGGGSGGGGSMLFQDFTHLYPLSKTVRFELKPIGRTLEHIHAKNFLSQDETMADMYQKVKVILDDYHRDFIADMMGEVKLTKLAEFYDVYLKFRKNPKDDGLQKQLKDLQAVLRKESVKPIGSGGKYKTGYDRLFGAKLFKDGKELGDLAKFVIAQEGESSPKLAHLAHFEKFSTYFTGFHDNRKNMYSDEDKHTAIAYRLIHENLPRFIDNLQILTTIKQKHSALYDQIINELTASGLDVSLASHLDGYHKLLTQEGITAYNRIIGEVNGYTNKHNQICHKSERIAKLRPLHKQILSDGMGVSFLPSKFADDSEMCQAVNEFYRHYTDVFAKVQSLFDGFDDHQKDGIYVEHKNLNELSKQAFGDFALLGRVLDGYYVDVVNPEFNERFAKAKTDNAKAKLTKEKDKFIKGVHSLASLEQAIEHHTARHDDESVQAGKLGQYFKHGLAGVDNPIQKIHNNHSTIKGFLERERPAGERALPKIKSGKNPEMTQLRQLKELLDNALNVAHFAKLLTTKTTLDNQDGNFYGEFGVLYDELAKIPTLYNKVRDYLSQKPFSTEKYKLNFGNPTLLNGWDLNKEKDNFGVILQKDGCYYLALLDKAHKKVFDNAPNTGKNVYQKMVYKLLPGPNKMLPKVFFAKSNLDYYNPSAELLDKYAKGTHKKGDNFNLKDCHALIDFFKAGINKHPEWQHFGFKFSPTSSYRDLSDFYREVEPQGYQVKFVDINADYIDELVEQGKLYLFQIYNKDFSPKAHGKPNLHTLYFKALFSEDNLADPIYKLNGEAQIFYRKASLDMNETTIHRAGEVLENKNPDNPKKRQFVYDIIKDKRYTQDKFMLHVPITMNFGVQGMTIKEFNKKVNQSIQQYDEVNVIGIDRGERHLLYLTVINSKGEILEQRSLNDITTASANGTQVTTPYHSLLDKKEKERFEARVGWGEIETIKELKSGYLSHVVHQINQLMLKYNAIVVLEDLNFGFKRGRFKVEKQIYQNFENALIKKLNHLVLKDKADDEIGSYKNALQLTNNFTDLKSIGKQTGFLFYVPAWNTSKIDPETGFVDLLKPRYENIAQSQAFFGKFDKICYNTDKGYFEFHIDYAKFTDKAKNSRQKWAICSHGDKRYVYDKTANQNKGAAKGINVNDELKSLFARYHINDKQPNLVMDICQNNDKEFHKSLMCLLKTLLALRYSNASSDEDFILSPVANDEGVFFNSALADDTQPQNADANGAYHIALKGLWLLNELKNSDDLNKVKLAIDNQTWLNFAQNRGGGGSGGGGSGGGGSGGGGSGGGGSGGGGSPKKKRKVSGGSSGGSPKKKRKV

SEQ ID NO: 60 - protein, 1340 aa, synthetic construct
MPKKKRKVGGGGSGGGGSGGGGSGGGGSGGGGSGGGGSMLFQDFTHLYPLSKTVRFELKPIGRTLEHIHAKNFLSQDETMADMYQKVKVILDDYHRDFIADMMGEVKLTKLAEFYDVYLKFRKNPKDDGLQKQLKDLQAVLRKESVKPIGSGGKYKTGYDRLFGAKLFKDGKELGDLAKFVIAQEGESSPKLAHLAHFEKFSTYFTGFHDNRKNMYSDEDKHTAIAYRLIHENLPRFIDNLQILTTIKQKHSALYDQIINELTASGLDVSLASHLDGYHKLLTQEGITAYNRIIGEVNGYTNKHNQICHKSERIAKLRPLHKQILSDGMGVSFLPSKFADDSEMCQAVNEFYRHYTDVFAKVQSLFDGFDDHQKDGIYVEHKNLNELSKQAFGDFALLGRVLDGYYVDVVNPEFNERFAKAKTDNAKAKLTKEKDKFIKGVHSLASLEQAIEHHTARHDDESVQAGKLGQYFKHGLAGVDNPIQKIHNNHSTIKGFLERERPAGERALPKIKSGKNPEMTQLRQLKELLDNALNVAHFAKLLTTKTTLDNQDGNFYGEFGVLYDELAKIPTLYNKVRDYLSQKPFSTEKYKLNFGNPTLLNGWDLNKEKDNFGVILQKDGCYYLALLDKAHKKVFDNAPNTGKNVYQKMVYKLLPGPNKMLPKVFFAKSNLDYYNPSAELLDKYAKGTHKKGDNFNLKDCHALIDFFKAGINKHPEWQHFGFKFSPTSSYRDLSDFYREVEPQGYQVKFVDINADYIDELVEQGKLYLFQIYNKDFSPKAHGKPNLHTLYFKALFSEDNLADPIYKLNGEAQIFYRKASLDMNETTIHRAGEVLENKNPDNPKKRQFVYDIIKDKRYTQDKFMLHVPITMNFGVQGMTIKEFNKKVNQSIQQYDEVNVIGIDRGERHLLYLTVINSKGEILEQRSLNDIINNFNGIRIKTDYHSLLDKKEKERFEARQNWGEIETIKELKSGYLSHVVHQINQLMLKYNAIVVLEDLNFGFKRGRFKVEKQIYQNFENALIKKLNHLVLKDKADDEIGSYKNALQLTNNFTDLKSIGKQTGFLFYVPAWNTSKIDPETGFVDLLKPRYENIAQSQAFFGKFDKICYNTDKGYFEFHIDYAKFTDKAKNSRQKWAICSHGDKRYVYDKTANQNKGAAKGINVNDELKSLFARYHINDKQPNLVMDICQNNDKEFHKSLMCLLKTLLALRYSNASSDEDFILSPVANDEGVFFNSALADDTQPQNADANGAYHIALKGLWLLNELKNSDDLNKVKLAIDNQTWLNFAQNRGGGGSGGGGSGGGGSGGGGSGGGGSGGGGSPKKKRKVSGGSSGGSPKKKRKV

SEQ ID NO: 61 - protein, 1341 aa, synthetic construct
MPKKKRKVGGGGSGGGGSGGGGSGGGGSGGGGSGGGGSMLFQDFTHLYPLSKTVRFELKPIGRTLEHIHAKNFLSQDETMADMYQKVKVILDDYHRDFIADMMGEVKLTKLAEFYDVYLKFRKNPKDDGLQKQLKDLQAVLRKESVKPIGSGGKYKTGYDRLFGAKLFKDGKELGDLAKFVIAQEGESSPKLAHLAHFEKFSTYFTGFHDNRKNMYSDEDKHTAIAYRLIHENLPRFIDNLQILTTIKQKHSALYDQIINELTASGLDVSLASHLDGYHKLLTQEGITAYNRIIGEVNGYTNKHNQICHKSERIAKLRPLHKQILSDGMGVSFLPSKFADDSEMCQAVNEFYRHYTDVFAKVQSLFDGFDDHQKDGIYVEHKNLNELSKQAFGDFALLGRVLDGYYVDVVNPEFNERFAKAKTDNAKAKLTKEKDKFIKGVHSLASLEQAIEHHTARHDDESVQAGKLGQYFKHGLAGVDNPIQKIHNNHSTIKGFLERERPAGERALPKIKSGKNPEMTQLRQLKELLDNALNVAHFAKLLTTKTTLDNQDGNFYGEFGVLYDELAKIPTLYNKVRDYLSQKPFSTEKYKLNFGNPTLLNGWDLNKEKDNFGVILQKDGCYYLALLDKAHKKVFDNAPNTGKNVYQKMVYKLLPGPNKMLPKVFFAKSNLDYYNPSAELLDKYAKGTHKKGDNFNLKDCHALIDFFKAGINKHPEWQHFGFKFSPTSSYRDLSDFYREVEPQGYQVKFVDINADYIDELVEQGKLYLFQIYNKDFSPKAHGKPNLHTLYFKALFSEDNLADPIYKLNGEAQIFYRKASLDMNETTIHRAGEVLENKNPDNPKKRQFVYDIIKDKRYTQDKFMLHVPITMNFGVQGMTIKEFNKKVNQSIQQYDEVNVIGIDRGERHLLYLTVINSKGEILEQRSLNDITTASANGTQVTTPYQKKLDNREKERVAARQAWGEIETIKELKSGYLSHVVHQINQLMLKYNAIVVLEDLNFGFKRGRFKVEKQIYQNFENALIKKLNHLVLKDKADDEIGSYKNALQLTNNFTDLKSIGKQTGFLFYVPAWNTSKIDPETGFVDLLKPRYENIAQSQAFFGKFDKICYNTDKGYFEFHIDYAKFTDKAKNSRQKWAICSHGDKRYVYDKTANQNKGAAKGINVNDELKSLFARYHINDKQPNLVMDICQNNDKEFHKSLMCLLKTLLALRYSNASSDEDFILSPVANDEGVFFNSALADDTQPQNADANGAYHIALKGLWLLNELKNSDDLNKVKLAIDNQTWLNFAQNRGGGGSGGGGSGGGGSGGGGSGGGGSGGGGSPKKKRKVSGGSSGGSPKKKRKV

SEQ ID NO: 62 - protein, 1332 aa, synthetic construct
MPKKKRKVGGGGSGGGGSGGGGSGGGGSGGGGSGGGGSMLFQDFTHLYPLSKTVRFELKPIGRTLEHIHAKNFLSQDETMADMYQKVKVILDDYHRDFIADMMGEVKLTKLAEFYDVYLKFRKNPKDDGLQKQLKDLQAVLRKESVKPIGSGGKYKTGYDRLFGAKLFKDGKELGDLAKFVIAQEGESSPKLAHLAHFEKFSTYFTGFHDNRKNMYSDEDKHTAIAYRLIHENLPRFIDNLQILTTIKQKHSALYDQIINELTASGLDVSLASHLDGYHKLLTQEGITAYNRIIGEVNGYTNKHNQICHKSERIAKLRPLHKQILSDGMGVSFLPSKFADDSEMCQAVNEFYRHYTDVFAKVQSLFDGFDDHQKDGIYVEHKNLNELSKQAFGDFALLGRVLDGYYVDVVNPEFNERFAKAKTDNAKAKLTKEKDKFIKGVHSLASLEQAIEHHTARHDDESVQAGKLGQYFKHGLAGVDNPIQKIHNNHSTIKGFLERERPAGERALPKIKSGKNPEMTQLRQLKELLDNALNVAHFAKLLTTKTTLDNQDGNFYGEFGVLYDELAKIPTLYNKVRDYLSQKPFSTEKYKLNFGNPTLLNGWDLNKEKDNFGVILQKDGCYYLALLDKAHKKVFDNAPNTGKNVYQKMVYKLLPGPNKMLPKVFFAKSNLDYYNPSAELLDKYAKGTHKKGDNFNLKDCHALIDFFKAGINKHPEWQHFGFKFSPTSSYRDLSDFYREVEPQGYQVKFVDINADYIDELVEQGKLYLFQIYNKDFSPKAHGKPNLHTLYFKALFSEDNLADPIYKLNGEAQIFYRKASLDMNETTIHRAGEVLENKNPDNPKKRQFVYDIIKDKRYTQDKFMLHVPITMNFGVQGMTIKEFNKKVNQSIQQYDEVNVIGIDRGERHLLYLTVINSKGEILEQRSLNTIQQFDYQKKLDNREKERVAARQAWGEIETIKELKSGYLSHVVHQINQLMLKYNAIVVLEDLNFGFKRGRFKVEKQIYQNFENALIKKLNHLVLKDKADDEIGSYKNALQLTNNFTDLKSIGKQTGFLFYVPAWNTSKIDPETGFVDLLKPRYENIAQSQAFFGKFDKICYNTDKGYFEFHIDYAKFTDKAKNSRQKWAICSHGDKRYVYDKTANQNKGAAKGINVNDELKSLFARYHINDKQPNLVMDICQNNDKEFHKSLMCLLKTLLALRYSNASSDEDFILSPVANDEGVFFNSALADDTQPQNADANGAYHIALKGLWLLNELKNSDDLNKVKLAIDNQTWLNFAQNRGGGGSGGGGSGGGGSGGGGSGGGGSGGGGSPKKKRKVSGGSSGGSPKKKRKV

SEQ ID NO: 63 - protein, 1332 aa, synthetic construct
MPKKKRKVGGGGSGGGGSGGGGSGGGGSGGGGSGGGGSMLFQDFTHLYPLSKTVRFELKPIGRTLEHIHAKNFLSQDETMADMYQKVKVILDDYHRDFIADMMGEVKLTKLAEFYDVYLKFRKNPKDDGLQKQLKDLQAVLRKESVKPIGSGGKYKTGYDRLFGAKLFKDGKELGDLAKFVIAQEGESSPKLAHLAHFEKFSTYFTGFHDNRKNMYSDEDKHTAIAYRLIHENLPRFIDNLQILTTIKQKHSALYDQIINELTASGLDVSLASHLDGYHKLLTQEGITAYNRIIGEVNGYTNKHNQICHKSERIAKLRPLHKQILSDGMGVSFLPSKFADDSEMCQAVNEFYRHYTDVFAKVQSLFDGFDDHQKDGIYVEHKNLNELSKQAFGDFALLGRVLDGYYVDVVNPEFNERFAKAKTDNAKAKLTKEKDKFIKGVHSLASLEQAIEHHTARHDDESVQAGKLGQYFKHGLAGVDNPIQKIHNNHSTIKGFLERERPAGERALPKIKSGKNPEMTQLRQLKELLDNALNVAHFAKLLTTKTTLDNQDGNFYGEFGVLYDELAKIPTLYNKVRDYLSQKPFSTEKYKLNFGNPTLLNGWDLNKEKDNFGVILQKDGCYYLALLDKAHKKVFDNAPNTGKNVYQKMVYKLLPGPNKMLPKVFFAKSNLDYYNPSAELLDKYAKGTHKKGDNFNLKDCHALIDFFKAGINKHPEWQHFGFKFSPTSSYRDLSDFYREVEPQGYQVKFVDINADYIDELVEQGKLYLFQIYNKDFSPKAHGKPNLHTLYFKALFSEDNLADPIYKLNGEAQIFYRKASLDMNETTIHRAGEVLENKNPDNPKKRQFVYDIIKDKRYTQDKFMLHVPITMNFGVQGMTIKEFNKKVNQSIQQYDEVNVIGIDRGERHLLYLTVINSKGEILEQRSLNTIQQFDYHKILDKREIERLNARVGWGEIETIKELKSGYLSHVVHQINQLMLKYNAIVVLEDLNFGFKRGRFKVEKQIYQNFENALIKKLNHLVLKDKADDEIGSYKNALQLTNNFTDLKSIGKQTGFLFYVPAWNTSKIDPETGFVDLLKPRYENIAQSQAFFGKFDKICYNTDKGYFEFHIDYAKFTDKAKNSRQKWAICSHGDKRYVYDKTANQNKGAAKGINVNDELKSLFARYHINDKQPNLVMDICQNNDKEFHKSLMCLLKTLLALRYSNASSDEDFILSPVANDEGVFFNSALADDTQPQNADANGAYHIALKGLWLLNELKNSDDLNKVKLAIDNQTWLNFAQNRGGGGSGGGGSGGGGSGGGGSGGGGSGGGGSPKKKRKVSGGSSGGSPKKKRKV

SEQ ID NO: 64 - protein, 1341 aa, synthetic construct
MPKKKRKVGGGGSGGGGSGGGGSGGGGSGGGGSGGGGSMLFQDFTHLYPLSKTVRFELKPIGRTLEHIHAKNFLSQDETMADMYQKVKVILDDYHRDFIADMMGEVKLTKLAEFYDVYLKFRKNPKDDGLQKQLKDLQAVLRKESVKPIGSGGKYKTGYDRLFGAKLFKDGKELGDLAKFVIAQEGESSPKLAHLAHFEKFSTYFTGFHDNRKNMYSDEDKHTAIAYRLIHENLPRFIDNLQILTTIKQKHSALYDQIINELTASGLDVSLASHLDGYHKLLTQEGITAYNRIIGEVNGYTNKHNQICHKSERIAKLRPLHKQILSDGMGVSFLPSKFADDSEMCQAVNEFYRHYTDVFAKVQSLFDGFDDHQKDGIYVEHKNLNELSKQAFGDFALLGRVLDGYYVDVVNPEFNERFAKAKTDNAKAKLTKEKDKFIKGVHSLASLEQAIEHHTARHDDESVQAGKLGQYFKHGLAGVDNPIQKIHNNHSTIKGFLERERPAGERALPKIKSGKNPEMTQLRQLKELLDNALNVAHFAKLLTTKTTLDNQDGNFYGEFGVLYDELAKIPTLYNKVRDYLSQKPFSTEKYKLNFGNPTLLNGWDLNKEKDNFGVILQKDGCYYLALLDKAHKKVFDNAPNTGKNVYQKMVYKLLPGPNKMLPKVFFAKSNLDYYNPSAELLDKYAKGTHKKGDNFNLKDCHALIDFFKAGINKHPEWQHFGFKFSPTSSYRDLSDFYREVEPQGYQVKFVDINADYIDELVEQGKLYLFQIYNKDFSPKAHGKPNLHTLYFKALFSEDNLADPIYKLNGEAQIFYRKASLDMNETTIHRAGEVLENKNPDNPKKRQFVYDIIKDKRYTQDKFMLHVPITMNFGVQGMTIKEFNKKVNQSIQQYDEVNVIGIDRGERHLLYLTVINSKGEILEQRSLNDITTASANGTQVTTPYHKILDKREIERVKARVGWGEIETIKELKSGYLSHVVHQINQLMLKYNAIVVLEDLNFGFKRGRFKVEKQIYQNFENALIKKLNHLVLKDKADDEIGSYKNALQLTNNFTDLKSIGKQTGFLFYVPAWNTSKIDPETGFVDLLKPRYENIAQSQAFFGKFDKICYNTDKGYFEFHIDYAKFTDKAKNSRQKWAICSHGDKRYVYDKTANQNKGAAKGINVNDELKSLFARYHINDKQPNLVMDICQNNDKEFHKSLMCLLKTLLALRYSNASSDEDFILSPVANDEGVFFNSALADDTQPQNADANGAYHIALKGLWLLNELKNSDDLNKVKLAIDNQTWLNFAQNRGGGGSGGGGSGGGGSGGGGSGGGGSGGGGSPKKKRKVSGGSSGGSPKKKRKV

SEQ ID NO: 65 - protein, 14 aa, unidentified
  source 1..14: note = Lachnospiraceae bacterium ND2006
QMRNSITGRTDVDF

SEQ ID NO: 66 - protein, 13 aa, Acidaminococcus sp.
  source 1..13: note = subsp. BV3L6
QMRNSNAATGEDY

SEQ ID NO: 67 - protein, 13 aa, Francisella sp.
  source 1..13: note = subsp. novicida U112
QMRNSKTGTELDY

SEQ ID NO: 68 - protein, 13 aa, Moraxella bovoculi
ALRYSNASSDEDF

SEQ ID NO: 69 - DNA, 17534 bp, synthetic construct
  source 1..17534: mol_type = other DNA
attcctgtggttggcatgcacatacaaatggacgaacggataaaccttttcacgcccttttaaatatccgattattctaataaacgctcttttctcttaggtttacccgccaatatatcctgtcaaacactgatagtttaaactggcactagcctaacggtgttgactaactaggccgcttccctaattagctaacccgggggcgcgccgggaccggaattcattatgtggtctaggtaggttctatatataagaaaacttgaaatgttctaaaaaaaaattcaagcccatgcatgattgaagcaaacggtatagcaacggtgttaacctgatctagtgatctcttgcaatccttaacggccacctaccgcaggtagcaaacggcgtccccctcctcgatatctccgcggcgacctctggctttttccgcggaattgcgcggtggggacggattccacgagaccgcgacgcaaccgcctctcgccgctgggccccacaccgctcggtgccgtagcctcacgggactctttctccctcctcccccgttataaattggcttcatcccctccttgcctcatccatccaaatcccagtccccaatcccatcccttcgtaggagaaattcatcgaagctaagcgaatcctcgcgatcctctcaaggtactgcgagttttcgatccccctctcgacccctcgtatgtttgtgtttgtcgtagcgtttgattaggtatgctttccctgtttgtgttcgtcgtagcgtttgattaggtatgctttccctgttcgtgttcatcgtagtgtttgattaggtcgtgtgaggcgatggcctgctcgcgtccttcgatctgtagtcgatttgcgggtcgtggtgtagatctgcgggctgtgatgaagttatttggtgtgatctgctcgcctgattctgcgggttggctcgagtagatatgatggttggaccggttggttcgtttaccgcgctagggttgggctgggatgatgttgcatgcgccgttgcgcgtgatcccgcagcaggacttgcgtttgattgccagatctcgttacgattatgtgatttggtttggactttttagatctgtagcttctgcttatgtgccagatgcgcctactgctcatatgcctgatgataatcataaatggctgtggaactaactagttgattgcggagtcatgtatcagctacaggtgtagggactagctacaggtgtagggacttgcgtctaattgtttggtcctttactcatgttgcaattatgcaatttagtttagattgtttgttccactcatctaggctgtaaaagggacactgcttagattgctgtttaatctttttagtagattatattatattggtaacttattacccctattacatgccatacgtgacttctgctcatgcctgatgataatcatagatcactgtggaattaattagttgattgttgaatcatgtttcatgtacataccacggcacaattgcttagttccttaacaaatgcaaattttactgatccatgtatgatttgcgtggttctctaatgtgaaatactatagctacttgttagtaagaatcaggttcgtatgcttaatgctgtatgtgccttctgctcatgcctgatgataatcatatatcactggaattaattagttgatcgtttaatcatatatcaagtacataccatgccacaatttttagtcacttaacccatgcagattgaactggtccctgcatgttttgctaaattgttctattctgattagaccatatatcatgtatttttttttggtaatggttctcttattttaaatgctatatagttctggtacttgttagaaagatctgcttcatagtttagttgcctatccctcgaattaggatgctgagcagctgatcctatagctttgtttcatgtatcaattcttttgtgttcaacagtcagtttttgttagattcattgtaacttatggtcgcttactcttctggtcctcaatgcttgcagggatcccctaaatagaccatgccgaagaagaagcgcaaggtcgggggcgggggctcaggcgggggcgggagcggcggcgggggctctgggggcggcggcagcggcgggggcggcagcgggggcggcgggtcgatgctgttccaggatttcactcatctgtaccctctctcaaagactgttcggttcgagctcaagcctattgggcggactctggagcacatccacgcgaagaacttcctcagccaggacgaaaccatggccgacatgtaccagaaggtcaaggtcatcctcgacgactaccacagggacttcatcgcggacatgatgggcgaggtgaagctgacgaagctcgccgagttctacgacgtctacctcaagttccgcaagaacccgaaggacgacggcctccagaagcagctcaaggacctgcaggccgtcctgaggaaggagtccgtcaagcccatcggcagcggcggcaagtacaagaccggctacgacaggctgttcggcgccaagctgttcaaggacggcaaggagctcggcgacctggcgaagttcgtgatcgcgcaggagggcgagagctcccccaagctggcccacctggcccacttcgagaagttcagcacgtacttcaccggcttccacgacaacaggaagaacatgtacagcgacgaggacaagcacacggccatcgcctaccgcctcatccacgagaacctgccccgcttcatcgacaacctgcagatcctgacgaccatcaagcagaagcactccgccctgtacgaccagatcatcaacgagctcaccgcgagcggcctcgacgtgtccctcgccagccacctcgacggctaccacaagctcctgacccaggagggcatcaccgcctacaaccgcatcatcggcgaggtgaacggctacaccaacaagcacaaccagatctgccacaagtccgagaggatcgccaagctcaggcccctgcacaagcagatcctcagcgacggcatgggcgtgagcttcctcccgtccaagttcgccgacgactccgagatgtgccaggccgtgaacgagttctacaggcactacaccgacgtgttcgccaaggtgcagtccctgttcgacggcttcgacgaccaccagaaggacggcatctacgtggagcacaagaacctgaacgagctgtccaagcaggccttcggcgacttcgccctcctgggccgcgtgctggacggctactacgtggacgtcgtgaacccggagttcaacgagcgcttcgcgaaggcgaagacggacaacgcgaaggccaagctcaccaaggagaaggacaagttcatcaagggcgtccacagcctcgcgtccctggagcaggcgatcgagcaccacaccgcgcgccacgacgacgagtccgtgcaggccggcaagctcggccagtacttcaagcacggcctggccggcgtcgacaacccgatccagaagatccacaacaaccactccaccatcaagggcttcctggagagggagcgcccggcgggcgagcgcgcgctccccaagatcaagtccggcaagaaccccgagatgacgcagctcaggcagctgaaggagctgctcgacaacgcgctcaacgtggcgcacttcgccaagctgctcacgaccaagaccacgctggacaaccaggacggcaacttctacggcgagttcggcgtcctgtacgacgagctggcgaagatcccgaccctgtacaacaaggtccgcgactacctgagccagaagcccttctccaccgagaagtacaagctcaacttcggcaacccgaccctcctgaacggctgggacctcaacaaggagaaggacaacttcggcgtgatcctccagaaggacggctgctactacctcgccctgctggacaaggcgcacaagaaggtcttcgacaacgccccgaacaccggcaagaacgtgtaccagaagatggtgtacaagctgctccccggccccaacaagatgctgccgaaggtgttcttcgcgaagtccaacctcgactactacaaccccagcgccgagctcctggacaagtacgccaagggcacgcacaagaagggcgacaacttcaacctcaaggactgccacgcgctgatcgacttcttcaaggcgggcatcaacaagcaccccgagtggcagcacttcggcttcaagttcagcccgacctccagctacagggacctcagcgacttctaccgcgaggtggagccccagggctaccaggtgaagttcgtcgacatcaacgccgactacatcgacgagctcgtcgagcagggcaagctctacctgttccagatctacaacaaggacttctccccgaaggcccacggcaagccgaacctccacacgctctacttcaaggccctcttcagcgaggacaacctggccgacccgatctacaagctcaacggcgaggcgcagatcttctaccgcaaggccagcctggacatgaacgaaacgaccatccacagggccggcgaggtcctggagaacaagaacccggacaacccgaagaagaggcagttcgtctacgacatcatcaaggacaagaggtacacccaggacaagttcatgctccacgtcccgatcaccatgaacttcggcgtccagggcatgaccatcaaggagttcaacaagaaggtcaaccagagcatccagcagtacgacgaggtgaacgtcatcggcatcgaccgcggcgagaggcacctgctctacctgacggtcatcaactccaagggcgagatcctcgagcagcgcagcctgaacgacatcacgaccgcgagcgccaacggcacgcaggtcaccacgccgtaccacaagatcctcgacaagcgcgagatcgagaggctgaacgcgcgcgtcggctggggcgagatcgaaacgatcaaggagctcaagtccggctacctcagccacgtcgtgcaccagatcaaccagctcatgctgaagtacaacgcgatcgtggtcctcgaggacctgaacttcggcttcaagaggggccgcttcaaggtggagaagcagatctaccagaacttcgagaacgccctgatcaagaagctcaaccacctggtcctcaaggacaaggcggacgacgagatcggcagctacaagaacgcgctccagctgaccaacaacttcacggacctcaagtccatcggcaagcagacgggcttcctgttctacgtgccggcgtggaacacctccaagatcgacccggaaaccggcttcgtcgacctgctcaagccgcgctacgagaacatcgcgcagtcccaggcgttcttcggcaagttcgacaagatctgctacaacaccgacaagggctacttcgagttccacatcgactacgcgaagttcaccgacaaggccaagaactccaggcagaagtgggccatctgcagccacggcgacaagcgctacgtgtacgacaagacggcgaaccagaacaagggcgcggccaagggcatcaacgtgaacgacgagctgaagtccctcttcgcgcgctaccacatcaacgacaagcagccgaacctcgtcatggacatctgccagaacaacgacaaggagttccacaagagcctgatgtgcctgctcaagaccctgctccagatgaggaactcgatcaccggcaggacggacgtggacttcatcctcagccccgtcgcgaacgacgagggcgtgttcttcaactccgccctcgcggacgacacgcagccgcagaacgccgacgcgaacggcgcctaccacatcgccctcaagggcctgtggctgctcaacgagctcaagaactccgacgacctgaacaaggtgaagctcgccattgacaaccagacgtggctgaatttcgctcagaatagggggggcgggggctcaggcgggggcgggagcggcggcgggggctctgggggcggcggcagcggcgggggcggcagcgggggcggcgggtcgccgaagaagaagcgcaaggtgtccggcggcagctccggcggcagcccgaagaagaagcgcaaagtgtgagggacccgatcgttcaaacatttggcaataaagtttcttaagattgaatcctgttgccggtcttgcgatgattatcatataatttctgttgaattacgttaagcatgtaataattaacatgtaatgcatgacgttatttatgagatgggtttttatgattagagtcccgcaattatacatttaatacgcgatagaaaacaaaatatagcgcgcaaactaggataaattatcgcgcgcggtgtcatctatgttactagatcggtaccgaattcattatgtggtctaggtaggttctatatataagaaaacttgaaatgttctaaaaaaaaattcaagcccatgcatgattgaagcaaacggtatagcaacggtgttaacctgatctagtgatctcttgcaatccttaacggccacctaccgcaggtagcaaacggcgtccccctcctcgatatctccgcggcgacctctggctttttccgcggaattgcgcggtggggacggattccacgagaccgcgacgcaaccgcctctcgccgctgggccccacaccgctcggtgccgtagcctcacgggactctttctccctcctcccccgttataaattggcttcatcccctccttgcctcatccatccaaatcccagtccccaatcccatcccttcgtaggagaaattcatcgaagctaagcgaatcctcgcgatcctctcaaggtactgcgagttttcgatccccctctcgacccctcgtatgtttgtgtttgtcgtagcgtttgattaggtatgctttccctgtttgtgttcgtcgtagcgtttgattaggtatgctttccctgttcgtgttcatcgtagtgtttgattaggtcgtgtgaggcgatggcctgctcgcgtccttcgatctgtagtcgatttgcgggtcgtggtgtagatctgcgggctgtgatgaagttatttggtgtgatctgctcgcctgattctgcgggttggctcgagtagatatgatggttggaccggttggttcgtttaccgcgctagggttgggctgggatgatgttgcatgcgccgttgcgcgtgatcccgcagcaggacttgcgtttgattgccagatctcgttacgattatgtgatttggtttggactttttagatctgtagcttctgcttatgtgccagatgcgcctactgctcatatgcctgatgataatcataaatggctgtggaactaactagttgattgcggagtcatgtatcagctacaggtgtagggactagctacaggtgtagggacttgcgtctaattgtttggtcctttactcatgttgcaattatgcaatttagtttagattgtttgttccactcatctaggctgtaaaagggacactgcttagattgctgtttaatctttttagtagattatattatattggtaacttattacccctattacatgccatacgtgacttctgctcatgcctgatgataatcatagatcactgtggaattaattagttgattgttgaatcatgtttcatgtacataccacggcacaattgcttagttccttaacaaatgcaaattttactgatccatgtatgatttgcgtggttctctaatgtgaaatactatagctacttgttagtaagaatcaggttcgtatgcttaatgctgtatgtgccttctgctcatgcctgatgataatcatatatcactggaattaattagttgatcgtttaatcatatatcaagtacataccatgccacaatttttagtcacttaacccatgcagattgaactggtccctgcatgttttgctaaattgttctattctgattagaccatatatcatgtatttttttttggtaatggttctcttattttaaatgctatatagttctggtacttgttagaaagatctgcttcatagtttagttgcctatccctcgaattaggatgctgagcagctgatcctatagctttgtttcatgtatcaattcttttgtgttcaacagtcagtttttgttagattcattgtaacttatggtcgcttactcttctggtcctcaatgcttgcagaagcttgaaattctgatgagtccgtgaggacgaaacgagtaagctcgtcaatttctactgtttgtagatgggaaagaccgaggagaagatctaatttctactgtttgtagatgcaccaaggaaggggaggagatcaatttctactgtttgtagatgtcacagatcacaaacttcaaatgaatttctactgtttgtagatacgcccagaaagcatacgcagtcggccggcatggtcccagcctcctcgctggcgccggctgggcaacatgcttcggcatggcgaatgggacgatcgttcaaacatttggcaataaagtttcttaagattgaatcctgttgccggtcttgcgatgattatcatataatttctgttgaattacgttaagcatgtaataattaacatgtaatgcatgacgttatttatgagatgggtttttatgattagagtcccgcaattatacatttaatacgcgatagaaaacaaaatatagcgcgcaaactaggataaattatcgcgcgcggtgtcatctatgttactagatccctaggctgcagtgcagcgtgacccggtcgtgcccctctctagagataatgagcattgcatgtctaagttataaaaaattaccacatattttttttgtcacacttgtttgaagtgcagtttatctatctttatacatatatttaaactttactctacgaataatataatctatagtactacaataatatcagtgttttagagaatcatataaatgaacagttagacatggtctaaaggacaattgagtattttgacaacaggactctacagttttatctttttagtgtgcatgtgttctcctttttttttgcaaatagcttcacctatataatacttcatccattttattagtacatccatttagggtttagggttaatggtttttatagactaatttttttagtacatctattttattctattttagcctctaaattaagaaaactaaaactctattttagtttttttatttaataatttagatataaaatagaataaaataaagtgactaaaaattaaacaaataccctttaagaaattaaaaaaactaaggaaacatttttcttgtttcgagtagataatgccagcctgttaaacgccgtcgacgagtctaacggacaccaaccagcgaaccagcagcgtcgcgtcgggccaagcgaagcagacggcacggcatctctgtcgctgcctctggacccctctcgagagttccgctccaccgttggacttgctccgctgtcggcatccagaaattgcgtggcggagcggcagacgtgagccggcacggcaggcggcctcctcctcctctcacggcaccggcagctacgggggattcctttcccaccgctccttcgctttcccttcctcgcccgccgtaataaatagacaccccctccacaccctctttccccaacctcgtgttgttcggagcgcacacacacacaaccagatctcccccaaatccacccgtcggcacctccgcttcaaggtacgccgctcgtcctccccccccccccctctctaccttctctagatcggcgttccggtccatggttagggcccggtagttctacttctgttcatgtttgtgttagatccgtgtttgtgttagatccgtgctgctagcgttcgtacacggatgcgacctgtacgtcagacacgttctgattgctaacttgccagtgtttctctttggggaatcctgggatggctctagccgttccgcagacgggatcgatttcatgattttttttgtttcgttgcatagggtttggtttgcccttttcctttatttcaatatatgccgtgcacttgtttgtcgggtcatcttttcatgcttttttttgtcttggttgtgatgatgtggtctggttgggcggtcgttctagatcggagtagaattctgtttcaaactacctggtggatttattaattttggatctgtatgtgtgtgccatacatattcatagttacgaattgaagatgatggatggaaatatcgatctaggataggtatacatgttgatgcgggttttactgatgcatatacagagatgctttttgttcgcttggttgtgatgatgtggtgtggttgggcggtcgttcattcgttctagatcggagtagaatactgtttcaaactacctggtgtatttattaattttggaactgtatgtgtgtgtcatacatcttcatagttacgagtttaagatggatggaaatatcgatctaggataggtatacatgttgatgtgggttttactgatgcatatacatgatggcatatgcagcatctattcatatgctctaaccttgagtacctatctattataataaacaagtatgttttataattattttgatcttgatatacttggatgatggcatatgcagcagctatatgtggatttttttagccctgccttcatacgctatttatttgcttggtactgtttcttttgtcgatgctcaccctgttgtttggtgttacttctgcagggatcaccgatcatgcaaaaactcattaactcagtgcaaaactatgcctggggcagcaaaacggcgttgactgaactttatggtatggaaaatccgtccagccagccgatggccgagctgtggatgggcgcacatccgaaaagcagttcacgagtgcagaatgccgccggagatatcgtttcactgcgtgatgtgattgagagtgataaatcgactctgctcggagaggccgttgccaaacgctttggcgaactgcctttcctgttcaaagtattatgcgcagcacagccactctccattcaggttcatccaaacaaacacaattctgaaatcggttttgccaaagaaaatgccgcaggtatcccgatggatgccgccgagcgtaactataaagatcctaaccacaagccggagctggtttttgcgctgacgcctttccttgcgatgaacgcgtttcgtgaattttccgagattgtctccctactccagccggtcgcaggtgcacatccggcgattgctcactttttacaacagcctgatgccgaacgtttaagcgaactgttcgccagcctgttgaatatgcagggtgaagaaaaatcccgcgcgctggcgattttaaaatcggccctcgatagccagcagggtgaaccgtggcaaacgattcgtttaatttctgaattttacccggaagacagcggtctgttctccccgctattgctgaatgtggtgaaattgaaccctggcgaagcgatgttcctgttcgctgaaacaccgcacgcttacctgcaaggcgtggcgctggaagtgatggcaaactccgataacgtgctgcgtgcgggtctgacgcctaaatacattgatattccggaactggttgccaatgtgaaattcgaagccaaaccggctaaccagttgttgacccagccggtgaaacaaggtgcagaactggacttcccgattccagtggatgattttgccttctcgctgcatgaccttagtgataaagaaaccaccattagccagcagagtgccgccattttgttctgcgtcgaaggcgatgcaacgttgtggaaaggttctcagcagttacagcttaaaccgggtgaatcagcgtttattgccgccaacgaatcaccggtgactgtcaaaggccacggccgtttagcgcgtgtttacaacaagctgtaagagcttactgaaaaaattaacatctcttgctaagctgggagctcgatccgtcgacctgcagatcgttcaaacatttggcaataaagtttcttaagattgaatcctgttgccggtcttgcgatgattatcatataatttctgttgaattacgttaagcatgtaataattaacatgtaatgcatgacgttatttatgagatgggtttttatgattagagtcccgcaattatacatttaatacgcgatagaaaacaaaatatagcgcgcaaactaggataaattatcgcgcgcggtgtcatctatgttactagatccggaccgcctgcaggcccgggggcgcgccctaattagctaacggccaggatcgccgcgtgagcctttagcaactagctagattaattaacgcaatctgttattaagttgtctaagcgtcaatttgtttacaccacaatatatcctgccaccagccagccaacagctccccgaccggcagctcggcacaaaatcaccactcgatacaggcagcccatcagaattaattctcatgtttgacagcttatcatcgactgcacggtgcaccaatgcttctggcgtcaggcagccatcggaagctgtggtatggctgtgcaggtcgtaaatcactgcataattcgtgtcgctcaaggcgcactcccgttctggataatgttttttgcgccgacatcataacggttctggcaaatattctgaaatgagctgttgacaattaatcatccggctcgtataatgtgtggaattgtgagcggataacaatttcacacaggaaacagaccatgagggaagcgttgatcgccgaagtatcgactcaactatcagaggtagttggcgtcatcgagcgccatctcgaaccgacgttgctggccgtacatttgtacggctccgcagtggatggcggcctgaagccacacagtgatattgatttgctggttacggtgaccgtaaggcttgatgaaacaacgcggcgagctttgatcaacgaccttttggaaacttcggcttcccctggagagagcgagattctccgcgctgtagaagtcaccattgttgtgcacgacgacatcattccgtggcgttatccagctaagcgcgaactgcaatttggagaatggcagcgcaatgacattcttgcaggtatcttcgagccagccacgatcgacattgatctggctatcttgctgacaaaagcaagagaacatagcgttgccttggtaggtccagcggcggaggaactctttgatccggttcctgaacaggatctatttgaggcgctaaatgaaaccttaacgctatggaactcgccgcccgactgggctggcgatgagcgaaatgtagtgcttacgttgtcccgcatttggtacagcgcagtaaccggcaaaatcgcgccgaaggatgtcgctgccgactgggcaatggagcgcctgccggcccagtatcagcccgtcatacttgaagctaggcaggcttatcttggacaagaagatcgcttggcctcgcgcgcagatcagttggaagaatttgttcactacgtgaaaggcgagatcaccaaagtagtcggcaaataaagctctagtggatctccgtacccagggatctggctcgcggcggacgcacgacgccggggcgagaccataggcgatctcctaaatcaatagtagctgtaacctcgaagcgtttcacttgtaacaacgattgagaatttttgtcataaaattgaaatacttggttcgcatttttgtcatccgcggtcagccgcaattctgacgaactgcccatttagctggagatgattgtacatccttcacgtgaaaatttctcaagcgctgtgaacaagggttcagattttagattgaaaggtgagccgttgaaacacgttcttcttgtcgatgacgacgtcgctatgcggcatcttattattgaataccttacgatccacgccttcaaagtgaccgcggtagccgacagcacccagttcacaagagtactctcttccgcgacggtcgatgtcgtggttgttgatctagatttaggtcgtgaagatgggctcgagatcgttcgtaatctggcggcaaagtctgatattccaatcataattatcagtggcgaccgccttgaggagacggataaagttgttgcactcgagctaggagcaagtgattttatcgctaagccgttcagtatcagagagtttctagcacgcattcgggttgccttgcgcgtgcgccccaacgttgtccgctccaaagaccgacggtctttttgttttactgactggacacttaatctcaggcaacgtcgcttgatgtccgaagctggcggtgaggtgaaacttacggcaggtgagttcaatcttctcctcgcgtttttagagaaaccccgcgacgttctatcgcgcgagcaacttctcattgccagtcgagtacgcgacgaggaggtttatgacaggagtatagatgttctcattttgaggctgcgccgcaaacttgaggcagatccgtcaagccctcaactgataaaaacagcaagaggtgccggttatttctttgacgcggacgtgcaggtttcgcacggggggacgatggcagcctgagccaattcccagatccccgaggaatcggcgtgagcggtcgcaaaccatccggcccggtacaaatcggcgcggcgctgggtgatgacctggtggagaagttgaaggccgcgcaggccgcccagcggcaacgcatcgaggcagaagcacgccccggtgaatcgtggcaagcggccgctgatcgaatccgcaaagaatcccggcaaccgccggcagccggtgcgccgtcgattaggaagccgcccaagggcgacgagcaaccagattttttcgttccgatgctctatgacgtgggcacccgcgatagtcgcagcatcatggacgtggccgttttccgtctgtcgaagcgtgaccgacgagctggcgaggtgatccgctacgagcttccagacgggcacgtagaggtttccgcagggccggccggcatggccagtgtgtgggattacgacctggtactgatggcggtttcccatctaaccgaatccatgaaccgataccgggaagggaagggagacaagcccggccgcgtgttccgtccacacgttgcggacgtactcaagttctgccggcgagccgatggcggaaagcagaaagacgacctggtagaaacctgcattcggttaaacaccacgcacgttgccatgcagcgtacgaagaaggccaagaacggccgcctggtgacggtatccgagggtgaagccttgattagccgctacaagatcgtaaagagcgaaaccgggcggccggagtacatcgagatcgagctggctgattggatgtaccgcgagatcacagaaggcaagaacccggacgtgctgacggttcaccccgattactttttgatcgatcccggcatcggccgttttctctaccgcctggcacgccgcgccgcaggcaaggcagaagccagatggttgttcaagacgatctacgaacgcagtggcagcgccggagagttcaagaagttctgtttcaccgtgcgcaagctgatcgggtcaaatgacctgccggagtacgatttgaaggaggaggcggggcaggctggcccgatcctagtcatgcgctaccgcaacctgatcgagggcgaagcatccgccggttcctaatgtacggagcagatgctagggcaaattgccctagcaggggaaaaaggtcgaaaaggtctctttcctgtggatagcacgtacattgggaacccaaagccgtacattgggaaccggaacccgtacattgggaacccaaagccgtacattgggaaccggtcacacatgtaagtgactgatataaaagagaaaaaaggcgatttttccgcctaaaactctttaaaacttattaaaactcttaaaacccgcctggcctgtgcataactgtctggccagcgcacagccgaagagctgcaaaaagcgcctacccttcggtcgctgcgctccctacgccccgccgcttcgcgtcggcctatcgcggccgctggccgctcaaaaatggctggcctacggccaggcaatctaccagggcgcggacaagccgcgccgtcgccactcgaccgccggcgctgaggtctgcctcgtgaagaaggtgttgctgactcataccaggcctgaatcgccccatcatccagccagaaagtgagggagccacggttgatgagagctttgttgtaggtggaccagttggtgattttgaacttttgctttgccacggaacggtctgcgttgtcgggaagatgcgtgatctgatccttcaactcagcaaaagttcgatttattcaacaaagccgccgtcccgtcaagtcagcgtaatgctctgccagtgttacaaccaattaaccaattctgattagaaaaactcatcgagcatcaaatgaaactgcaatttattcatatcaggattatcaataccatatttttgaaaaagccgtttctgtaatgaaggagaaaactcaccgaggcagttccataggatggcaagatcctggtatcggtctgcgattccgactcgtccaacatcaatacaacctattaatttcccctcgtcaaaaataaggttatcaagtgagaaatcaccatgagtgacgactgaatccggtgagaatggcaaaagctctgcattaatgaatcggccaacgcgcggggagaggcggtttgcgtattgggcgctcttccgcttcctcgctcactgactcgctgcgctcggtcgttcggctgcggcgagcggtatcagctcactcaaaggcggtaatacggttatccacagaatcaggggataacgcaggaaagaacatgtgagcaaaaggccagcaaaaggccaggaaccgtaaaaaggccgcgttgctggcgtttttccataggctccgcccccctgacgagcatcacaaaaatcgacgctcaagtcagaggtggcgaaacccgacaggactataaagataccaggcgtttccccctggaagctccctcgtgcgctctcctgttccgaccctgccgcttaccggatacctgtccgcctttctcccttcgggaagcgtggcgctttctcatagctcacgctgtaggtatctcagttcggtgtaggtcgttcgctccaagctgggctgtgtgcacgaaccccccgttcagcccgaccgctgcgccttatccggtaactatcgtcttgagtccaacccggtaagacacgacttatcgccactggcagcagccactggtaacaggattagcagagcgaggtatgtaggcggtgctacagagttcttgaagtggtggcctaactacggctacactagaagaacagtatttggtatctgcgctctgctgaagccagttaccttcggaaaaagagttggtagctcttgatccggcaaacaaaccaccgctggtagcggtggtttttttgtttgcaagcagcagattacgcgcagaaaaaaaggatctcaagaagatcctttgatcttttctacggggtctgacgctcagtggaacgaaaactcacgttaagggattttggtcatgagattatcaaaaaggatcttcacctagatccttttgatccggaatta

SEQ ID NO: 70 - DNA, 17531 bp, synthetic construct
  source 1..17531: mol_type = other DNA
attcctgtggttggcatgcacatacaaatggacgaacggataaaccttttcacgcccttttaaatatccgattattctaataaacgctcttttctcttaggtttacccgccaatatatcctgtcaaacactgatagtttaaactggcactagcctaacggtgttgactaactaggccgcttccctaattagctaacccgggggcgcgccgggaccggaattcattatgtggtctaggtaggttctatatataagaaaacttgaaatgttctaaaaaaaaattcaagcccatgcatgattgaagcaaacggtatagcaacggtgttaacctgatctagtgatctcttgcaatccttaacggccacctaccgcaggtagcaaacggcgtccccctcctcgatatctccgcggcgacctctggctttttccgcggaattgcgcggtggggacggattccacgagaccgcgacgcaaccgcctctcgccgctgggccccacaccgctcggtgccgtagcctcacgggactctttctccctcctcccccgttataaattggcttcatcccctccttgcctcatccatccaaatcccagtccccaatcccatcccttcgtaggagaaattcatcgaagctaagcgaatcctcgcgatcctctcaaggtactgcgagttttcgatccccctctcgacccctcgtatgtttgtgtttgtcgtagcgtttgattaggtatgctttccctgtttgtgttcgtcgtagcgtttgattaggtatgctttccctgttcgtgttcatcgtagtgtttgattaggtcgtgtgaggcgatggcctgctcgcgtccttcgatctgtagtcgatttgcgggtcgtggtgtagatctgcgggctgtgatgaagttatttggtgtgatctgctcgcctgattctgcgggttggctcgagtagatatgatggttggaccggttggttcgtttaccgcgctagggttgggctgggatgatgttgcatgcgccgttgcgcgtgatcccgcagcaggacttgcgtttgattgccagatctcgttacgattatgtgatttggtttggactttttagatctgtagcttctgcttatgtgccagatgcgcctactgctcatatgcctgatgataatcataaatggctgtggaactaactagttgattgcggagtcatgtatcagctacaggtgtagggactagctacaggtgtagggacttgcgtctaattgtttggtcctttactcatgttgcaattatgcaatttagtttagattgtttgttccactcatctaggctgtaaaagggacactgcttagattgctgtttaatctttttagtagattatattatattggtaacttattacccctattacatgccatacgtgacttctgctcatgcctgatgataatcatagatcactgtggaattaattagttgattgttgaatcatgtttcatgtacataccacggcacaattgcttagttccttaacaaatgcaaattttactgatccatgtatgatttgcgtggttctctaatgtgaaatactatagctacttgttagtaagaatcaggttcgtatgcttaatgctgtatgtgccttctgctcatgcctgatgataatcatatatcactggaattaattagttgatcgtttaatcatatatcaagtacataccatgccacaatttttagtcacttaacccatgcagattgaactggtccctgcatgttttgctaaattgttctattctgattagaccatatatcatgtatttttttttggtaatggttctcttattttaaatgctatatagttctggtacttgttagaaagatctgcttcatagtttagttgcctatccctcgaattaggatgctgagcagctgatcctatagctttgtttcatgtatcaattcttttgtgttcaacagtcagtttttgttagattcattgtaacttatggtcgcttactcttctggtcctcaatgcttgcagggatcccctaaatagaccatgccgaagaagaagcgcaaggtcgggggcgggggctcaggcgggggcgggagcggcggcgggggctctgggggcggcggcagcggcgggggcggcagcgggggcggcgggtcgatgctgttccaggatttcactcatctgtaccctctctcaaagactgttcggttcgagctcaagcctattgggcggactctggagcacatccacgcgaagaacttcctcagccaggacgaaaccatggccgacatgtaccagaaggtcaaggtcatcctcgacgactaccacagggacttcatcgcggacatgatgggcgaggtgaagctgacgaagctcgccgagttctacgacgtctacctcaagttccgcaagaacccgaaggacgacggcctccagaagcagctcaaggacctgcaggccgtcctgaggaaggagtccgtcaagcccatcggcagcggcggcaagtacaagaccggctacgacaggctgttcggcgccaagctgttcaaggacggcaaggagctcggcgacctggcgaagttcgtgatcgcgcaggagggcgagagctcccccaagctggcccacctggcccacttcgagaagttcagcacgtacttcaccggcttccacgacaacaggaagaacatgtacagcgacgaggacaagcacacggccatcgcctaccgcctcatccacgagaacctgccccgcttcatcgacaacctgcagatcctgacgaccatcaagcagaagcactccgccctgtacgaccagatcatcaacgagctcaccgcgagcggcctcgacgtgtccctcgccagccacctcgacggctaccacaagctcctgacccaggagggcatcaccgcctacaaccgcatcatcggcgaggtgaacggctacaccaacaagcacaaccagatctgccacaagtccgagaggatcgccaagctcaggcccctgcacaagcagatcctcagcgacggcatgggcgtgagcttcctcccgtccaagttcgccgacgactccgagatgtgccaggccgtgaacgagttctacaggcactacaccgacgtgttcgccaaggtgcagtccctgttcgacggcttcgacgaccaccagaaggacggcatctacgtggagcacaagaacctgaacgagctgtccaagcaggccttcggcgacttcgccctcctgggccgcgtgctggacggctactacgtggacgtcgtgaacccggagttcaacgagcgcttcgcgaaggcgaagacggacaacgcgaaggccaagctcaccaaggagaaggacaagttcatcaagggcgtccacagcctcgcgtccctggagcaggcgatcgagcaccacaccgcgcgccacgacgacgagtccgtgcaggccggcaagctcggccagtacttcaagcacggcctggccggcgtcgacaacccgatccagaagatccacaacaaccactccaccatcaagggcttcctggagagggagcgcccggcgggcgagcgcgcgctccccaagatcaagtccggcaagaaccccgagatgacgcagctcaggcagctgaaggagctgctcgacaacgcgctcaacgtggcgcacttcgccaagctgctcacgaccaagaccacgctggacaaccaggacggcaacttctacggcgagttcggcgtcctgtacgacgagctggcgaagatcccgaccctgtacaacaaggtccgcgactacctgagccagaagcccttctccaccgagaagtacaagctcaacttcggcaacccgaccctcctgaacggctgggacctcaacaaggagaaggacaacttcggcgtgatcctccagaaggacggctgctactacctcgccctgctggacaaggcgcacaagaaggtcttcgacaacgccccgaacaccggcaagaacgtgtaccagaagatggtgtacaagctgctccccggccccaacaagatgctgccgaaggtgttcttcgcgaagtccaacctcgactactacaaccccagcgccgagctcctggacaagtacgccaagggcacgcacaagaagggcgacaacttcaacctcaaggactgccacgcgctgatcgacttcttcaaggcgggcatcaacaagcaccccgagtggcagcacttcggcttcaagttcagcccgacctccagctacagggacctcagcgacttctaccgcgaggtggagccccagggctaccaggtgaagttcgtcgacatcaacgccgactacatcgacgagctcgtcgagcagggcaagctctacctgttccagatctacaacaaggacttctccccgaaggcccacggcaagccgaacctccacacgctctacttcaaggccctcttcagcgaggacaacctggccgacccgatctacaagctcaacggcgaggcgcagatcttctaccgcaaggccagcctggacatgaacgaaacgaccatccacagggccggcgaggtcctggagaacaagaacccggacaacccgaagaagaggcagttcgtctacgacatcatcaaggacaagaggtacacccaggacaagttcatgctccacgtcccgatcaccatgaacttcggcgtccagggcatgaccatcaaggagttcaacaagaaggtcaaccagagcatccagcagtacgacgaggtgaacgtcatcggcatcgaccgcggcgagaggcacctgctctacctgacggtcatcaactccaagggcgagatcctcgagcagcgcagcctgaacgacatcacgaccgcgagcgccaacggcacgcaggtcaccacgccgtaccacaagatcctcgacaagcgcgagatcgagaggctgaacgcgcgcgtcggctggggcgagatcgaaacgatcaaggagctcaagtccggctacctcagccacgtcgtgcaccagatcaaccagctcatgctgaagtacaacgcgatcgtggtcctcgaggacctgaacttcggcttcaagaggggccgcttcaaggtggagaagcagatctaccagaacttcgagaacgccctgatcaagaagctcaaccacctggtcctcaaggacaaggcggacgacgagatcggcagctacaagaacgcgctccagctgaccaacaacttcacggacctcaagtccatcggcaagcagacgggcttcctgttctacgtgccggcgtggaacacctccaagatcgacccggaaaccggcttcgtcgacctgctcaagccgcgctacgagaacatcgcgcagtcccaggcgttcttcggcaagttcgacaagatctgctacaacaccgacaagggctacttcgagttccacatcgactacgcgaagttcaccgacaaggccaagaactccaggcagaagtgggccatctgcagccacggcgacaagcgctacgtgtacgacaagacggcgaaccagaacaagggcgcggccaagggcatcaacgtgaacgacgagctgaagtccctcttcgcgcgctaccacatcaacgacaagcagccgaacctcgtcatggacatctgccagaacaacgacaaggagttccacaagagcctgatgtgcctgctcaagaccctgctccagatgaggaactcgaacgccgcgaccggcgaggactacatcctcagccccgtcgcgaacgacgagggcgtgttcttcaactccgccctcgcggacgacacgcagccgcagaacgccgacgcgaacggcgcctaccacatcgccctcaagggcctgtggctgctcaacgagctcaagaactccgacgacctgaacaaggtgaagctcgccattgacaaccagacgtggctgaatttcgctcagaatagggggggcgggggctcaggcgggggcgggagcggcggcgggggctctgggggcggcggcagcggcgggggcggcagcgggggcggcgggtcgccgaagaagaagcgcaaggtgtccggcggcagctccggcggcagcccgaagaagaagcgcaaagtgtgagggacccgatcgttcaaacatttggcaataaagtttcttaagattgaatcctgttgccggtcttgcgatgattatcatataatttctgttgaattacgttaagcatgtaataattaacatgtaatgcatgacgttatttatgagatgggtttttatgattagagtcccgcaattatacatttaatacgcgatagaaaacaaaatatagcgcgcaaactaggataaattatcgcgcgcggtgtcatctatgttactagatcggtaccgaattcattatgtggtctaggtaggttctatatataagaaaacttgaaatgttctaaaaaaaaattcaagcccatgcatgattgaagcaaacggtatagcaacggtgttaacctgatctagtgatctcttgcaatccttaacggccacctaccgcaggtagcaaacggcgtccccctcctcgatatctccgcggcgacctctggctttttccgcggaattgcgcggtggggacggattccacgagaccgcgacgcaaccgcctctcgccgctgggccccacaccgctcggtgccgtagcctcacgggactctttctccctcctcccccgttataaattggcttcatcccctccttgcctcatccatccaaatcccagtccccaatcccatcccttcgtaggagaaattcatcgaagctaagcgaatcctcgcgatcctctcaaggtactgcgagttttcgatccccctctcgacccctcgtatgtttgtgtttgtcgtagcgtttgattaggtatgctttccctgtttgtgttcgtcgtagcgtttgattaggtatgctttccctgttcgtgttcatcgtagtgtttgattaggtcgtgtgaggcgatggcctgctcgcgtccttcgatctgtagtcgatttgcgggtcgtggtgtagatctgcgggctgtgatgaagttatttggtgtgatctgctcgcctgattctgcgggttggctcgagtagatatgatggttggaccggttggttcgtttaccgcgctagggttgggctgggatgatgttgcatgcgccgttgcgcgtgatcccgcagcaggacttgcgtttgattgccagatctcgttacgattatgtgatttggtttggactttttagatctgtagcttctgcttatgtgccagatgcgcctactgctcatatgcctgatgataatcataaatggctgtggaactaactagttgattgcggagtcatgtatcagctacaggtgtagggactagctacaggtgtagggacttgcgtctaattgtttggtcctttactcatgttgcaattatgcaatttagtttagattgtttgttccactcatctaggctgtaaaagggacactgcttagattgctgtttaatctttttagtagattatattatattggtaacttattacccctattacatgccatacgtgacttctgctcatgcctgatgataatcatagatcactgtggaattaattagttgattgttgaatcatgtttcatgtacataccacggcacaattgcttagttccttaacaaatgcaaattttactgatccatgtatgatttgcgtggttctctaatgtgaaatactatagctacttgttagtaagaatcaggttcgtatgcttaatgctgtatgtgccttctgctcatgcctgatgataatcatatatcactggaattaattagttgatcgtttaatcatatatcaagtacataccatgccacaatttttagtcacttaacccatgcagattgaactggtccctgcatgttttgctaaattgttctattctgattagaccatatatcatgtatttttttttggtaatggttctcttattttaaatgctatatagttctggtacttgttagaaagatctgcttcatagtttagttgcctatccctcgaattaggatgctgagcagctgatcctatagctttgtttcatgtatcaattcttttgtgttcaacagtcagtttttgttagattcattgtaacttatggtcgcttactcttctggtcctcaatgcttgcagaagcttgaaattctgatgagtccgtgaggacgaaacgagtaagctcgtcaatttctactgtttgtagatgggaaagaccgaggagaagatctaatttctactgtttgtagatgcaccaaggaaggggaggagatcaatttctactgtttgtagatgtcacagatcacaaacttcaaatgaatttctactgtttgtagatacgcccagaaagcatacgcagtcggccggcatggtcccagcctcctcgctggcgccggctgggcaacatgcttcggcatggcgaatgggacgatcgttcaaacatttggcaataaagtttcttaagattgaatcctgttgccggtcttgcgatgattatcatataatttctgttgaattacgttaagcatgtaataattaacatgtaatgcatgacgttatttatgagatgggtttttatgattagagtcccgcaattatacatttaatacgcgatagaaaacaaaatatagcgcgcaaactaggataaattatcgcgcgcggtgtcatctatgttactagatccctaggctgcagtgcagcgtgacccggtcgtgcccctctctagagataatgagcattgcatgtctaagttataaaaaattaccacatattttttttgtcacacttgtttgaagtgcagtttatctatctttatacatatatttaaactttactctacgaataatataatctatagtactacaataatatcagtgttttagagaatcatataaatgaacagttagacatggtctaaaggacaattgagtattttgacaacaggactctacagttttatctttttagtgtgcatgtgttctcctttttttttgcaaatagcttcacctatataatacttcatccattttattagtacatccatttagggtttagggttaatggtttttatagactaatttttttagtacatctattttattctattttagcctctaaattaagaaaactaaaactctattttagtttttttatttaataatttagatataaaatagaataaaataaagtgactaaaaattaaacaaataccctttaagaaattaaaaaaactaaggaaacatttttcttgtttcgagtagataatgccagcctgttaaacgccgtcgacgagtctaacggacaccaaccagcgaaccagcagcgtcgcgtcgggccaagcgaagcagacggcacggcatctctgtcgctgcctctggacccctctcgagagttccgctccaccgttggacttgctccgctgtcggcatccagaaattgcgtggcggagcggcagacgtgagccggcacggcaggcggcctcctcctcctctcacggcaccggcagctacgggggattcctttcccaccgctccttcgctttcccttcctcgcccgccgtaataaatagacaccccctccacaccctctttccccaacctcgtgttgttcggagcgcacacacacacaaccagatctcccccaaatccacccgtcggcacctccgcttcaaggtacgccgctcgtcctccccccccccccctctctaccttctctagatcggcgttccggtccatggttagggcccggtagttctacttctgttcatgtttgtgttagatccgtgtttgtgttagatccgtgctgctagcgttcgtacacggatgcgacctgtacgtcagacacgttctgattgctaacttgccagtgtttctctttggggaatcctgggatggctctagccgttccgcagacgggatcgatttcatgattttttttgtttcgttgcatagggtttggtttgcccttttcctttatttcaatatatgccgtgcacttgtttgtcgggtcatcttttcatgcttttttttgtcttggttgtgatgatgtggtctggttgggcggtcgttctagatcggagtagaattctgtttcaaactacctggtggatttattaattttggatctgtatgtgtgtgccatacatattcatagttacgaattgaagatgatggatggaaatatcgatctaggataggtatacatgttgatgcgggttttactgatgcatatacagagatgctttttgttcgcttggttgtgatgatgtggtgtggttgggcggtcgttcattcgttctagatcggagtagaatactgtttcaaactacctggtgtatttattaattttggaactgtatgtgtgtgtcatacatcttcatagttacgagtttaagatggatggaaatatcgatctaggataggtatacatgttgatgtgggttttactgatgcatatacatgatggcatatgcagcatctattcatatgctctaaccttgagtacctatctattataataaacaagtatgttttataattattttgatcttgatatacttggatgatggcatatgcagcagctatatgtggatttttttagccctgccttcatacgctatttatttgcttggtactgtttcttttgtcgatgctcaccctgttgtttggtgttacttctgcagggatcaccgatcatgcaaaaactcattaactcagtgcaaaactatgcctggggcagcaaaacggcgttgactgaactttatggtatggaaaatccgtccagccagccgatggccgagctgtggatgggcgcacatccgaaaagcagttcacgagtgcagaatgccgccggagatatcgtttcactgcgtgatgtgattgagagtgataaatcgactctgctcggagaggccgttgccaaacgctttggcgaactgcctttcctgttcaaagtattatgcgcagcacagccactctccattcaggttcatccaaacaaacacaattctgaaatcggttttgccaaagaaaatgccgcaggtatcccgatggatgccgccgagcgtaactataaagatcctaaccacaagccggagctggtttttgcgctgacgcctttccttgcgatgaacgcgtttcgtgaattttccgagattgtctccctactccagccggtcgcaggtgcacatccggcgattgctcactttttacaacagcctgatgccgaacgtttaagcgaactgttcgccagcctgttgaatatgcagggtgaagaaaaatcccgcgcgctggcgattttaaaatcggccctcgatagccagcagggtgaaccgtggcaaacgattcgtttaatttctgaattttacccggaagacagcggtctgttctccccgctattgctgaatgtggtgaaattgaaccctggcgaagcgatgttcctgttcgctgaaacaccgcacgcttacctgcaaggcgtggcgctggaagtgatggcaaactccgataacgtgctgcgtgcgggtctgacgcctaaatacattgatattccggaactggttgccaatgtgaaattcgaagccaaaccggctaaccagttgttgacccagccggtgaaacaaggtgcagaactggacttcccgattccagtggatgattttgccttctcgctgcatgaccttagtgataaagaaaccaccattagccagcagagtgccgccattttgttctgcgtcgaaggcgatgcaacgttgtggaaaggttctcagcagttacagcttaaaccgggtgaatcagcgtttattgccgccaacgaatcaccggtgactgtcaaaggccacggccgtttagcgcgtgtttacaacaagctgtaagagcttactgaaaaaattaacatctcttgctaagctgggagctcgatccgtcgacctgcagatcgttcaaacatttggcaataaagtttcttaagattgaatcctgttgccggtcttgcgatgattatcatataatttctgttgaattacgttaagcatgtaataattaacatgtaatgcatgacgttatttatgagatgggtttttatgattagagtcccgcaattatacatttaatacgcgatagaaaacaaaatatagcgcgcaaactaggataaattatcgcgcgcggtgtcatctatgttactagatccggaccgcctgcaggcccgggggcgcgccctaattagctaacggccaggatcgccgcgtgagcctttagcaactagctagattaattaacgcaatctgttattaagttgtctaagcgtcaatttgtttacaccacaatatatcctgccaccagccagccaacagctccccgaccggcagctcggcacaaaatcaccactcgatacaggcagcccatcagaattaattctcatgtttgacagcttatcatcgactgcacggtgcaccaatgcttctggcgtcaggcagccatcggaagctgtggtatggctgtgcaggtcgtaaatcactgcataattcgtgtcgctcaaggcgcactcccgttctggataatgttttttgcgccgacatcataacggttctggcaaatattctgaaatgagctgttgacaattaatcatccggctcgtataatgtgtggaattgtgagcggataacaatttcacacaggaaacagaccatgagggaagcgttgatcgccgaagtatcgactcaactatcagaggtagttggcgtcatcgagcgccatctcgaaccgacgttgctggccgtacatttgtacggctccgcagtggatggcggcctgaagccacacagtgatattgatttgctggttacggtgaccgtaaggcttgatgaaacaacgcggcgagctttgatcaacgaccttttggaaacttcggcttcccctggagagagcgagattctccgcgctgtagaagtcaccattgttgtgcacgacgacatcattccgtggcgttatccagctaagcgcgaactgcaatttggagaatggcagcgcaatgacattcttgcaggtatcttcgagccagccacgatcgacattgatctggctatcttgctgacaaaagcaagagaacatagcgttgccttggtaggtccagcggcggaggaactctttgatccggttcctgaacaggatctatttgaggcgctaaatgaaaccttaacgctatggaactcgccgcccgactgggctggcgatgagcgaaatgtagtgcttacgttgtcccgcatttggtacagcgcagtaaccggcaaaatcgcgccgaaggatgtcgctgccgactgggcaatggagcgcctgccggcccagtatcagcccgtcatacttgaagctaggcaggcttatcttggacaagaagatcgcttggcctcgcgcgcagatcagttggaagaatttgttcactacgtgaaaggcgagatcaccaaagtagtcggcaaataaagctctagtggatctccgtacccagggatctggctcgcggcggacgcacgacgccggggcgagaccataggcgatctcctaaatcaatagtagctgtaacctcgaagcgtttcacttgtaacaacgattgagaatttttgtcataaaattgaaatacttggttcgcatttttgtcatccgcggtcagccgcaattctgacgaactgcccatttagctggagatgattgtacatccttcacgtgaaaatttctcaagcgctgtgaacaagggttcagattttagattgaaaggtgagccgttgaaacacgttcttcttgtcgatgacgacgtcgctatgcggcatcttattattgaataccttacgatccacgccttcaaagtgaccgcggtagccgacagcacccagttcacaagagtactctcttccgcgacggtcgatgtcgtggttgttgatctagatttaggtcgtgaagatgggctcgagatcgttcgtaatctggcggcaaagtctgatattccaatcataattatcagtggcgaccgccttgaggagacggataaagttgttgcactcgagctaggagcaagtgattttatcgctaagccgttcagtatcagagagtttctagcacgcattcgggttgccttgcgcgtgcgccccaacgttgtccgctccaaagaccgacggtctttttgttttactgactggacacttaatctcaggcaacgtcgcttgatgtccgaagctggcggtgaggtgaaacttacggcaggtgagttcaatcttctcctcgcgtttttagagaaaccccgcgacgttctatcgcgcgagcaacttctcattgccagtcgagtacgcgacgaggaggtttatgacaggagtatagatgttctcattttgaggctgcgccgcaaacttgaggcagatccgtcaagccctcaactgataaaaacagcaagaggtgccggttatttctttgacgcggacgtgcaggtttcgcacggggggacgatggcagcctgagccaattcccagatccccgaggaatcggcgtgagcggtcgcaaaccatccggcccggtacaaatcggcgcggcgctgggtgatgacctggtggagaagttgaaggccgcgcaggccgcccagcggcaacgcatcgaggcagaagcacgccccggtgaatcgtggcaagcggccgctgatcgaatccgcaaagaatcccggcaaccgccggcagccggtgcgccgtcgattaggaagccgcccaagggcgacgagcaaccagattttttcgttccgatgctctatgacgtgggcacccgcgatagtcgcagcatcatggacgtggccgttttccgtctgtcgaagcgtgaccgacgagctggcgaggtgatccgctacgagcttccagacgggcacgtagaggtttccgcagggccggccggcatggccagtgtgtgggattacgacctggtactgatggcggtttcccatctaaccgaatccatgaaccgataccgggaagggaagggagacaagcccggccgcgtgttccgtccacacgttgcggacgtactcaagttctgccggcgagccgatggcggaaagcagaaagacgacctggtagaaacctgcattcggttaaacaccacgcacgttgccatgcagcgtacgaagaaggccaagaacggccgcctggtgacggtatccgagggtgaagccttgattagccgctacaagatcgtaaagagcgaaaccgggcggccggagtacatcgagatcgagctggctgattggatgtaccgcgagatcacagaaggcaagaacccggacgtgctgacggttcaccccgattactttttgatcgatcccggcatcggccgttttctctaccgcctggcacgccgcgccgcaggcaaggcagaagccagatggttgttcaagacgatctacgaacgcagtggcagcgccggagagttcaagaagttctgtttcaccgtgcgcaagctgatcgggtcaaatgacctgccggagtacgatttgaaggaggaggcggggcaggctggcccgatcctagtcatgcgctaccgcaacctgatcgagggcgaagcatccgccggttcctaatgtacggagcagatgctagggcaaattgccctagcaggggaaaaaggtcgaaaaggtctctttcctgtggatagcacgtacattgggaacccaaagccgtacattgggaaccggaacccgtacattgggaacccaaagccgtacattgggaaccggtcacacatgtaagtgactgatataaaagagaaaaaaggcgatttttccgcctaaaactctttaaaacttattaaaactcttaaaacccgcctggcctgtgcataactgtctggccagcgcacagccgaagagctgcaaaaagcgcctacccttcggtcgctgcgctccctacgccccgccgcttcgcgtcggcctatcgcggccgctggccgctcaaaaatggctggcctacggccaggcaatctaccagggcgcggacaagccgcgccgtcgccactcgaccgccggcgctgaggtctgcctcgtgaagaaggtgttgctgactcataccaggcctgaatcgccccatcatccagccagaaagtgagggagccacggttgatgagagctttgttgtaggtggaccagttggtgattttgaacttttgctttgccacggaacggtctgcgttgtcgggaagatgcgtgatctgatccttcaactcagcaaaagttcgatttattcaacaaagccgccgtcccgtcaagtcagcgtaatgctctgccagtgttacaaccaattaaccaattctgattagaaaaactcatcgagcatcaaatgaaactgcaatttattcatatcaggattatcaataccatatttttgaaaaagccgtttctgtaatgaaggagaaaactcaccgaggcagttccataggatggcaagatcctggtatcggtctgcgattccgactcgtccaacatcaatacaacctattaatttcccctcgtcaaaaataaggttatcaagtgagaaatcaccatgagtgacgactgaatccggtgagaatggcaaaagctctgcattaatgaatcggccaacgcgcggggagaggcggtttgcgtattgggcgctcttccgcttcctcgctcactgactcgctgcgctcggtcgttcggctgcggcgagcggtatcagctcactcaaaggcggtaatacggttatccacagaatcaggggataacgcaggaaagaacatgtgagcaaaaggccagcaaaaggccaggaaccgtaaaaaggccgcgttgctggcgtttttccataggctccgcccccctgacgagcatcacaaaaatcgacgctcaagtcagaggtggcgaaacccgacaggactataaagataccaggcgtttccccctggaagctccctcgtgcgctctcctgttccgaccctgccgcttaccggatacctgtccgcctttctcccttcgggaagcgtggcgctttctcatagctcacgctgtaggtatctcagttcggtgtaggtcgttcgctccaagctgggctgtgtgcacgaaccccccgttcagcccgaccgctgcgccttatccggtaactatcgtcttgagtccaacccggtaagacacgacttatcgccactggcagcagccactggtaacaggattagcagagcgaggtatgtaggcggtgctacagagttcttgaagtggtggcctaactacggctacactagaagaacagtatttggtatctgcgctctgctgaagccagttaccttcggaaaaagagttggtagctcttgatccggcaaacaaaccaccgctggtagcggtggtttttttgtttgcaagcagcagattacgcgcagaaaaaaaggatctcaagaagatcctttgatcttttctacggggtctgacgctcagtggaacgaaaactcacgttaagggattttggtcatgagattatcaaaaaggatcttcacctagatccttttgatccggaatta

SEQ ID NO: 71 - DNA, 17531 bp, synthetic construct
  source 1..17531: mol_type = other DNA
attcctgtggttggcatgcacatacaaatggacgaacggataaaccttttcacgcccttttaaatatccgattattctaataaacgctcttttctcttaggtttacccgccaatatatcctgtcaaacactgatagtttaaactggcactagcctaacggtgttgactaactaggccgcttccctaattagctaacccgggggcgcgccgggaccggaattcattatgtggtctaggtaggttctatatataagaaaacttgaaatgttctaaaaaaaaattcaagcccatgcatgattgaagcaaacggtatagcaacggtgttaacctgatctagtgatctcttgcaatccttaacggccacctaccgcaggtagcaaacggcgtccccctcctcgatatctccgcggcgacctctggctttttccgcggaattgcgcggtggggacggattccacgagaccgcgacgcaaccgcctctcgccgctgggccccacaccgctcggtgccgtagcctcacgggactctttctccctcctcccccgttataaattggcttcatcccctccttgcctcatccatccaaatcccagtccccaatcccatcccttcgtaggagaaattcatcgaagctaagcgaatcctcgcgatcctctcaaggtactgcgagttttcgatccccctctcgacccctcgtatgtttgtgtttgtcgtagcgtttgattaggtatgctttccctgtttgtgttcgtcgtagcgtttgattaggtatgctttccctgttcgtgttcatcgtagtgtttgattaggtcgtgtgaggcgatggcctgctcgcgtccttcgatctgtagtcgatttgcgggtcgtggtgtagatctgcgggctgtgatgaagttatttggtgtgatctgctcgcctgattctgcgggttggctcgagtagatatgatggttggaccggttggttcgtttaccgcgctagggttgggctgggatgatgttgcatgcgccgttgcgcgtgatcccgcagcaggacttgcgtttgattgccagatctcgttacgattatgtgatttggtttggactttttagatctgtagcttctgcttatgtgccagatgcgcctactgctcatatgcctgatgataatcataaatggctgtggaactaactagttgattgcggagtcatgtatcagctacaggtgtagggactagctacaggtgtagggacttgcgtctaattgtttggtcctttactcatgttgcaattatgcaatttagtttagattgtttgttccactcatctaggctgtaaaagggacactgcttagattgctgtttaatctttttagtagattatattatattggtaacttattacccctattacatgccatacgtgacttctgctcatgcctgatgataatcatagatcactgtggaattaattagttgattgttgaatcatgtttcatgtacataccacggcacaattgcttagttccttaacaaatgcaaattttactgatccatgtatgatttgcgtggttctctaatgtgaaatactatagctacttgttagtaagaatcaggttcgtatgcttaatgctgtatgtgccttctgctcatgcctgatgataatcatatatcactggaattaattagttgatcgtttaatcatatatcaagtacataccatgccacaatttttagtcacttaacccatgcagattgaactggtccctgcatgttttgctaaattgttctattctgattagaccatatatcatgtatttttttttggtaatggttctcttattttaaatgctatatagttctggtacttgttagaaagatctgcttcatagtttagttgcctatccctcgaattaggatgctgagcagctgatcctatagctttgtttcatgtatcaattcttttgtgttcaacagtcagtttttgttagattcattgtaacttatggtcgcttactcttctggtcctcaatgcttgcagggatcccctaaatagaccatgccgaagaagaagcgcaaggtcgggggcgggggctcaggcgggggcgggagcggcggcgggggctctgggggcggcggcagcggcgggggcggcagcgggggcggcgggtcgatgctgttccaggatttcactcatctgtaccctctctcaaagactgttcggttcgagctcaagcctattgggcggactctggagcacatccacgcgaagaacttcctcagccaggacgaaaccatggccgacatgtaccagaaggtcaaggtcatcctcgacgactaccacagggacttcatcgcggacatgatgggcgaggtgaagctgacgaagctcgccgagttctacgacgtctacctcaagttccgcaagaacccgaaggacgacggcctccagaagcagctcaaggacctgcaggccgtcctgaggaaggagtccgtcaagcccatcggcagcggcggcaagtacaagaccggctacgacaggctgttcggcgccaagctgttcaaggacggcaaggagctcggcgacctggcgaagttcgtgatcgcgcaggagggcgagagctcccccaagctggcccacctggcccacttcgagaagttcagcacgtacttcaccggcttccacgacaacaggaagaacatgtacagcgacgaggacaagcacacggccatcgcctaccgcctcatccacgagaacctgccccgcttcatcgacaacctgcagatcctgacgaccatcaagcagaagcactccgccctgtacgaccagatcatcaacgagctcaccgcgagcggcctcgacgtgtccctcgccagccacctcgacggctaccacaagctcctgacccaggagggcatcaccgcctacaaccgcatcatcggcgaggtgaacggctacaccaacaagcacaaccagatctgccacaagtccgagaggatcgccaagctcaggcccctgcacaagcagatcctcagcgacggcatgggcgtgagcttcctcccgtccaagttcgccgacgactccgagatgtgccaggccgtgaacgagttctacaggcactacaccgacgtgttcgccaaggtgcagtccctgttcgacggcttcgacgaccaccagaaggacggcatctacgtggagcacaagaacctgaacgagctgtccaagcaggccttcggcgacttcgccctcctgggccgcgtgctggacggctactacgtggacgtcgtgaacccggagttcaacgagcgcttcgcgaaggcgaagacggacaacgcgaaggccaagctcaccaaggagaaggacaagttcatcaagggcgtccacagcctcgcgtccctggagcaggcgatcgagcaccacaccgcgcgccacgacgacgagtccgtgcaggccggcaagctcggccagtacttcaagcacggcctggccggcgtcgacaacccgatccagaagatccacaacaaccactccaccatcaagggcttcctggagagggagcgcccggcgggcgagcgcgcgctccccaagatcaagtccggcaagaaccccgagatgacgcagctcaggcagctgaaggagctgctcgacaacgcgctcaacgtggcgcacttcgccaagctgctcacgaccaagaccacgctggacaaccaggacggcaacttctacggcgagttcggcgtcctgtacgacgagctggcgaagatcccgaccctgtacaacaaggtccgcgactacctgagccagaagcccttctccaccgagaagtacaagctcaacttcggcaacccgaccctcctgaacggctgggacctcaacaaggagaaggacaacttcggcgtgatcctccagaaggacggctgctactacctcgccctgctggacaaggcgcacaagaaggtcttcgacaacgccccgaacaccggcaagaacgtgtaccagaagatggtgtacaagctgctccccggccccaacaagatgctgccgaaggtgttcttcgcgaagtccaacctcgactactacaaccccagcgccgagctcctggacaagtacgccaagggcacgcacaagaagggcgacaacttcaacctcaaggactgccacgcgctgatcgacttcttcaaggcgggcatcaacaagcaccccgagtggcagcacttcggcttcaagttcagcccgacctccagctacagggacctcagcgacttctaccgcgaggtggagccccagggctaccaggtgaagttcgtcgacatcaacgccgactacatcgacgagctcgtcgagcagggcaagctctacctgttccagatctacaacaaggacttctccccgaaggcccacggcaagccgaacctccacacgctctacttcaaggccctcttcagcgaggacaacctggccgacccgatctacaagctcaacggcgaggcgcagatcttctaccgcaaggccagcctggacatgaacgaaacgaccatccacagggccggcgaggtcctggagaacaagaacccggacaacccgaagaagaggcagttcgtctacgacatcatcaaggacaagaggtacacccaggacaagttcatgctccacgtcccgatcaccatgaacttcggcgtccagggcatgaccatcaaggagttcaacaagaaggtcaaccagagcatccagcagtacgacgaggtgaacgtcatcggcatcgaccgcggcgagaggcacctgctctacctgacggtcatcaactccaagggcgagatcctcgagcagcgcagcctgaacgacatcacgaccgcgagcgccaacggcacgcaggtcaccacgccgtaccacaagatcctcgacaagcgcgagatcgagaggctgaacgcgcgcgtcggctggggcgagatcgaaacgatcaaggagctcaagtccggctacctcagccacgtcgtgcaccagatcaaccagctcatgctgaagtacaacgcgatcgtggtcctcgaggacctgaacttcggcttcaagaggggccgcttcaaggtggagaagcagatctaccagaacttcgagaacgccctgatcaagaagctcaaccacctggtcctcaaggacaaggcggacgacgagatcggcagctacaagaacgcgctccagctgaccaacaacttcacggacctcaagtccatcggcaagcagacgggcttcctgttctacgtgccggcgtggaacacctccaagatcgacccggaaaccggcttcgtcgacctgctcaagccgcgctacgagaacatcgcgcagtcccaggcgttcttcggcaagttcgacaagatctgctacaacaccgacaagggctacttcgagttccacatcgactacgcgaagttcaccgacaaggccaagaactccaggcagaagtgggccatctgcagccacggcgacaagcgctacgtgtacgacaagacggcgaaccagaacaagggcgcggccaagggcatcaacgtgaacgacgagctgaagtccctcttcgcgcgctaccacatcaacgacaagcagccgaacctcgtcatggacatctgccagaacaacgacaaggagttccacaagagcctgatgtgcctgctcaagaccctgctcgccctccgcaactccaacgcgagctccgacgaggacttcatcctcagccccgtcgcgaacgacgagggcgtgttcttcaactccgccctcgcggacgacacgcagccgcagaacgccgacgcgaacggcgcctaccacatcgccctcaagggcctgtggctgctcaacgagctcaagaactccgacgacctgaacaaggtgaagctcgccattgacaaccagacgtggctgaatttcgctcagaatagggggggcgggggctcaggcgggggcgggagcggcggcgggggctctgggggcggcggcagcggcgggggcggcagcgggggcggcgggtcgccgaagaagaagcgcaaggtgtccggcggcagctccggcggcagcccgaagaagaagcgcaaagtgtgagggacccgatcgttcaaacatttggcaataaagtttcttaagattgaatcctgttgccggtcttgcgatgattatcatataatttctgttgaattacgttaagcatgtaataattaacatgtaatgcatgacgttatttatgagatgggtttttatgattagagtcccgcaattatacatttaatacgcgatagaaaacaaaatatagcgcgcaaactaggataaattatcgcgcgcggtgtcatctatgttactagatcggtaccgaattcattatgtggtctaggtaggttctatatataagaaaacttgaaatgttctaaaaaaaaattcaagcccatgcatgattgaagcaaacggtatagcaacggtgttaacctgatctagtgatctcttgcaatccttaacggccacctaccgcaggtagcaaacggcgtccccctcctcgatatctccgcggcgacctctggctttttccgcggaattgcgcggtggggacggattccacgagaccgcgacgcaaccgcctctcgccgctgggccccacaccgctcggtgccgtagcctcacgggactctttctccctcctcccccgttataaattggcttcatcccctccttgcctcatccatccaaatcccagtccccaatcccatcccttcgtaggagaaattcatcgaagctaagcgaatcctcgcgatcctctcaaggtactgcgagttttcgatccccctctcgacccctcgtatgtttgtgtttgtcgtagcgtttgattaggtatgctttccctgtttgtgttcgtcgtagcgtttgattaggtatgctttccctgttcgtgttcatcgtagtgtttgattaggtcgtgtgaggcgatggcctgctcgcgtccttcgatctgtagtcgatttgcgggtcgtggtgtagatctgcgggctgtgatgaagttatttggtgtgatctgctcgcctgattctgcgggttggctcgagtagatatgatggttggaccggttggttcgtttaccgcgctagggttgggctgggatgatgttgcatgcgccgttgcgcgtgatcccgcagcaggacttgcgtttgattgccagatctcgttacgattatgtgatttggtttggactttttagatctgtagcttctgcttatgtgccagatgcgcctactgctcatatgcctgatgataatcataaatggctgtggaactaactagttgattgcggagtcatgtatcagctacaggtgtagggactagctacaggtgtagggacttgcgtctaattgtttggtcctttactcatgttgcaattatgcaatttagtttagattgtttgttccactcatctaggctgtaaaagggacactgcttagattgctgtttaatctttttagtagattatattatattggtaacttattacccctattacatgccatacgtgacttctgctcatgcctgatgataatcatagatcactgtggaattaattagttgattgttgaatcatgtttcatgtacataccacggcacaattgcttagttccttaacaaatgcaaattttactgatccatgtatgatttgcgtggttctctaatgtgaaatactatagctacttgttagtaagaatcaggttcgtatgcttaatgctgtatgtgccttctgctcatgcctgatgataatcatatatcactggaattaattagttgatcgtttaatcatatatcaagtacataccatgccacaatttttagtcacttaacccatgcagattgaactggtccctgcatgttttgctaaattgttctattctgattagaccatatatcatgtatttttttttggtaatggttctcttattttaaatgctatatagttctggtacttgttagaaagatctgcttcatagtttagttgcctatccctcgaattaggatgctgagcagctgatcctatagctttgtttcatgtatcaattcttttgtgttcaacagtcagtttttgttagattcattgtaacttatggtcgcttactcttctggtcctcaatgcttgcagaagcttgaaattctgatgagtccgtgaggacgaaacgagtaagctcgtcaatttctactgtttgtagatgggaaagaccgaggagaagatctaatttctactgtttgtagatgcaccaaggaaggggaggagatcaatttctactgtttgtagatgtcacagatcacaaacttcaaatgaatttctactgtttgtagatacgcccagaaagcatacgcagtcggccggcatggtcccagcctcctcgctggcgccggctgggcaacatgcttcggcatggcgaatgggacgatcgttcaaacatttggcaataaagtttcttaagattgaatcctgttgccggtcttgcgatgattatcatataatttctgttgaattacgttaagcatgtaataattaacatgtaatgcatgacgttatttatgagatgggtttttatgattagagtcccgcaattatacatttaatacgcgatagaaaacaaaatatagcgcgcaaactaggataaattatcgcgcgcggtgtcatctatgttactagatccctaggctgcagtgcagcgtgacccggtcgtgcccctctctagagataatgagcattgcatgtctaagttataaaaaattaccacatattttttttgtcacacttgtttgaagtgcagtttatctatctttatacatatatttaaactttactctacgaataatataatctatagtactacaataatatcagtgttttagagaatcatataaatgaacagttagacatggtctaaaggacaattgagtattttgacaacaggactctacagttttatctttttagtgtgcatgtgttctcctttttttttgcaaatagcttcacctatataatacttcatccattttattagtacatccatttagggtttagggttaatggtttttatagactaatttttttagtacatctattttattctattttagcctctaaattaagaaaactaaaactctattttagtttttttatttaataatttagatataaaatagaataaaataaagtgactaaaaattaaacaaataccctttaagaaattaaaaaaactaaggaaacatttttcttgtttcgagtagataatgccagcctgttaaacgccgtcgacgagtctaacggacaccaaccagcgaaccagcagcgtcgcgtcgggccaagcgaagcagacggcacggcatctctgtcgctgcctctggacccctctcgagagttccgctccaccgttggacttgctccgctgtcggcatccagaaattgcgtggcggagcggcagacgtgagccggcacggcaggcggcctcctcctcctctcacggcaccggcagctacgggggattcctttcccaccgctccttcgctttcccttcctcgcccgccgtaataaatagacaccccctccacaccctctttccccaacctcgtgttgttcggagcgcacacacacacaaccagatctcccccaaatccacccgtcggcacctccgcttcaaggtacgccgctcgtcctccccccccccccctctctaccttctctagatcggcgttccggtccatggttagggcccggtagttctacttctgttcatgtttgtgttagatccgtgtttgtgttagatccgtgctgctagcgttcgtacacggatgcgacctgtacgtcagacacgttctgattgctaacttgccagtgtttctctttggggaatcctgggatggctctagccgttccgcagacgggatcgatttcatgattttttttgtttcgttgcatagggtttggtttgcccttttcctttatttcaatatatgccgtgcacttgtttgtcgggtcatcttttcatgcttttttttgtcttggttgtgatgatgtggtctggttgggcggtcgttctagatcggagtagaattctgtttcaaactacctggtggatttattaattttggatctgtatgtgtgtgccatacatattcatagttacgaattgaagatgatggatggaaatatcgatctaggataggtatacatgttgatgcgggttttactgatgcatatacagagatgctttttgttcgcttggttgtgatgatgtggtgtggttgggcggtcgttcattcgttctagatcggagtagaatactgtttcaaactacctggtgtatttattaattttggaactgtatgtgtgtgtcatacatcttcatagttacgagtttaagatggatggaaatatcgatctaggataggtatacatgttgatgtgggttttactgatgcatatacatgatggcatatgcagcatctattcatatgctctaaccttgagtacctatctattataataaacaagtatgttttataattattttgatcttgatatacttggatgatggcatatgcagcagctatatgtggatttttttagccctgccttcatacgctatttatttgcttggtactgtttcttttgtcgatgctcaccctgttgtttggtgttacttctgcagggatcaccgatcatgcaaaaactcattaactcagtgcaaaactatgcctggggcagcaaaacggcgttgactgaactttatggtatggaaaatccgtccagccagccgatggccgagctgtggatgggcgcacatccgaaaagcagttcacgagtgcagaatgccgccggagatatcgtttcactgcgtgatgtgattgagagtgataaatcgactctgctcggagaggccgttgccaaacgctttggcgaactgcctttcctgttcaaagtattatgcgcagcacagccactctccattcaggttcatccaaacaaacacaattctgaaatcggttttgccaaagaaaatgccgcaggtatcccgatggatgccgccgagcgtaactataaagatcctaaccacaagccggagctggtttttgcgctgacgcctttccttgcgatgaacgcgtttcgtgaattttccgagattgtctccctactccagccggtcgcaggtgcacatccggcgattgctcactttttacaacagcctgatgccgaacgtttaagcgaactgttcgccagcctgttgaatatgcagggtgaagaaaaatcccgcgcgctggcgattttaaaatcggccctcgatagccagcagggtgaaccgtggcaaacgattcgtttaatttctgaattttacccggaagacagcggtctgttctccccgctattgctgaatgtggtgaaattgaaccctggcgaagcgatgttcctgttcgctgaaacaccgcacgcttacctgcaaggcgtggcgctggaagtgatggcaaactccgataacgtgctgcgtgcgggtctgacgcctaaatacattgatattccggaactggttgccaatgtgaaattcgaagccaaaccggctaaccagttgttgacccagccggtgaaacaaggtgcagaactggacttcccgattccagtggatgattttgccttctcgctgcatgaccttagtgataaagaaaccaccattagccagcagagtgccgccattttgttctgcgtcgaaggcgatgcaacgttgtggaaaggttctcagcagttacagcttaaaccgggtgaatcagcgtttattgccgccaacgaatcaccggtgactgtcaaaggccacggccgtttagcgcgtgtttacaacaagctgtaagagcttactgaaaaaattaacatctcttgctaagctgggagctcgatccgtcgacctgcagatcgttcaaacatttggcaataaagtttcttaagattgaatcctgttgccggtcttgcgatgattatcatataatttctgttgaattacgttaagcatgtaataattaacatgtaatgcatgacgttatttatgagatgggtttttatgattagagtcccgcaattatacatttaatacgcgatagaaaacaaaatatagcgcgcaaactaggataaattatcgcgcgcggtgtcatctatgttactagatccggaccgcctgcaggcccgggggcgcgccctaattagctaacggccaggatcgccgcgtgagcctttagcaactagctagattaattaacgcaatctgttattaagttgtctaagcgtcaatttgtttacaccacaatatatcctgccaccagccagccaacagctccccgaccggcagctcggcacaaaatcaccactcgatacaggcagcccatcagaattaattctcatgtttgacagcttatcatcgactgcacggtgcaccaatgcttctggcgtcaggcagccatcggaagctgtggtatggctgtgcaggtcgtaaatcactgcataattcgtgtcgctcaaggcgcactcccgttctggataatgttttttgcgccgacatcataacggttctggcaaatattctgaaatgagctgttgacaattaatcatccggctcgtataatgtgtggaattgtgagcggataacaatttcacacaggaaacagaccatgagggaagcgttgatcgccgaagtatcgactcaactatcagaggtagttggcgtcatcgagcgccatctcgaaccgacgttgctggccgtacatttgtacggctccgcagtggatggcggcctgaagccacacagtgatattgatttgctggttacggtgaccgtaaggcttgatgaaacaacgcggcgagctttgatcaacgaccttttggaaacttcggcttcccctggagagagcgagattctccgcgctgtagaagtcaccattgttgtgcacgacgacatcattccgtggcgttatccagctaagcgcgaactgcaatttggagaatggcagcgcaatgacattcttgcaggtatcttcgagccagccacgatcgacattgatctggctatcttgctgacaaaagcaagagaacatagcgttgccttggtaggtccagcggcggaggaactctttgatccggttcctgaacaggatctatttgaggcgctaaatgaaaccttaacgctatggaactcgccgcccgactgggctggcgatgagcgaaatgtagtgcttacgttgtcccgcatttggtacagcgcagtaaccggcaaaatcgcgccgaaggatgtcgctgccgactgggcaatggagcgcctgccggcccagtatcagcccgtcatacttgaagctaggcaggcttatcttggacaagaagatcgcttggcctcgcgcgcagatcagttggaagaatttgttcactacgtgaaaggcgagatcaccaaagtagtcggcaaataaagctctagtggatctccgtacccagggatctggctcgcggcggacgcacgacgccggggcgagaccataggcgatctcctaaatcaatagtagctgtaacctcgaagcgtttcacttgtaacaacgattgagaatttttgtcataaaattgaaatacttggttcgcatttttgtcatccgcggtcagccgcaattctgacgaactgcccatttagctggagatgattgtacatccttcacgtgaaaatttctcaagcgctgtgaacaagggttcagattttagattgaaaggtgagccgttgaaacacgttcttcttgtcgatgacgacgtcgctatgcggcatcttattattgaataccttacgatccacgccttcaaagtgaccgcggtagccgacagcacccagttcacaagagtactctcttccgcgacggtcgatgtcgtggttgttgatctagatttaggtcgtgaagatgggctcgagatcgttcgtaatctggcggcaaagtctgatattccaatcataattatcagtggcgaccgccttgaggagacggataaagttgttgcactcgagctaggagcaagtgattttatcgctaagccgttcagtatcagagagtttctagcacgcattcgggttgccttgcgcgtgcgccccaacgttgtccgctccaaagaccgacggtctttttgttttactgactggacacttaatctcaggcaacgtcgcttgatgtccgaagctggcggtgaggtgaaacttacggcaggtgagttcaatcttctcctcgcgtttttagagaaaccccgcgacgttctatcgcgcgagcaacttctcattgccagtcgagtacgcgacgaggaggtttatgacaggagtatagatgttctcattttgaggctgcgccgcaaacttgaggcagatccgtcaagccctcaactgataaaaacagcaagaggtgccggttatttctttgacgcggacgtgcaggtttcgcacggggggacgatggcagcctgagccaattcccagatccccgaggaatcggcgtgagcggtcgcaaaccatccggcccggtacaaatcggcgcggcgctgggtgatgacctggtggagaagttgaaggccgcgcaggccgcccagcggcaacgcatcgaggcagaagcacgccccggtgaatcgtggcaagcggccgctgatcgaatccgcaaagaatcccggcaaccgccggcagccggtgcgccgtcgattaggaagccgcccaagggcgacgagcaaccagattttttcgttccgatgctctatgacgtgggcacccgcgatagtcgcagcatcatggacgtggccgttttccgtctgtcgaagcgtgaccgacgagctggcgaggtgatccgctacgagcttccagacgggcacgtagaggtttccgcagggccggccggcatggccagtgtgtgggattacgacctggtactgatggcggtttcccatctaaccgaatccatgaaccgataccgggaagggaagggagacaagcccggccgcgtgttccgtccacacgttgcggacgtactcaagttctgccggcgagccgatggcggaaagcagaaagacgacctggtagaaacctgcattcggttaaacaccacgcacgttgccatgcagcgtacgaagaaggccaagaacggccgcctggtgacggtatccgagggtgaagccttgattagccgctacaagatcgtaaagagcgaaaccgggcggccggagtacatcgagatcgagctggctgattggatgtaccgcgagatcacagaaggcaagaacccggacgtgctgacggttcaccccgattactttttgatcgatcccggcatcggccgttttctctaccgcctggcacgccgcgccgcaggcaaggcagaagccagatggttgttcaagacgatctacgaacgcagtggcagcgccggagagttcaagaagttctgtttcaccgtgcgcaagctgatcgggtcaaatgacctgccggagtacgatttgaaggaggaggcggggcaggctggcccgatcctagtcatgcgctaccgcaacctgatcgagggcgaagcatccgccggttcctaatgtacggagcagatgctagggcaaattgccctagcaggggaaaaaggtcgaaaaggtctctttcctgtggatagcacgtacattgggaacccaaagccgtacattgggaaccggaacccgtacattgggaacccaaagccgtacattgggaaccggtcacacatgtaagtgactgatataaaagagaaaaaaggcgatttttccgcctaaaactctttaaaacttattaaaactcttaaaacccgcctggcctgtgcataactgtctggccagcgcacagccgaagagctgcaaaaagcgcctacccttcggtcgctgcgctccctacgccccgccgcttcgcgtcggcctatcgcggccgctggccgctcaaaaatggctggcctacggccaggcaatctaccagggcgcggacaagccgcgccgtcgccactcgaccgccggcgctgaggtctgcctcgtgaagaaggtgttgctgactcataccaggcctgaatcgccccatcatccagccagaaagtgagggagccacggttgatgagagctttgttgtaggtggaccagttggtgattttgaacttttgctttgccacggaacggtctgcgttgtcgggaagatgcgtgatctgatccttcaactcagcaaaagttcgatttattcaacaaagccgccgtcccgtcaagtcagcgtaatgctctgccagtgttacaaccaattaaccaattctgattagaaaaactcatcgagcatcaaatgaaactgcaatttattcatatcaggattatcaataccatatttttgaaaaagccgtttctgtaatgaaggagaaaactcaccgaggcagttccataggatggcaagatcctggtatcggtctgcgattccgactcgtccaacatcaatacaacctattaatttcccctcgtcaaaaataaggttatcaagtgagaaatcaccatgagtgacgactgaatccggtgagaatggcaaaagctctgcattaatgaatcggccaacgcgcggggagaggcggtttgcgtattgggcgctcttccgcttcctcgctcactgactcgctgcgctcggtcgttcggctgcggcgagcggtatcagctcactcaaaggcggtaatacggttatccacagaatcaggggataacgcaggaaagaacatgtgagcaaaaggccagcaaaaggccaggaaccgtaaaaaggccgcgttgctggcgtttttccataggctccgcccccctgacgagcatcacaaaaatcgacgctcaagtcagaggtggcgaaacccgacaggactataaagataccaggcgtttccccctggaagctccctcgtgcgctctcctgttccgaccctgccgcttaccggatacctgtccgcctttctcccttcgggaagcgtggcgctttctcatagctcacgctgtaggtatctcagttcggtgtaggtcgttcgctccaagctgggctgtgtgcacgaaccccccgttcagcccgaccgctgcgccttatccggtaactatcgtcttgagtccaacccggtaagacacgacttatcgccactggcagcagccactggtaacaggattagcagagcgaggtatgtaggcggtgctacagagttcttgaagtggtggcctaactacggctacactagaagaacagtatttggtatctgcgctctgctgaagccagttaccttcggaaaaagagttggtagctcttgatccggcaaacaaaccaccgctggtagcggtggtttttttgtttgcaagcagcagattacgcgcagaaaaaaaggatctcaagaagatcctttgatcttttctacggggtctgacgctcagtggaacgaaaactcacgttaagggattttggtcatgagattatcaaaaaggatcttcacctagatccttttgatccggaatta

SEQ ID NO: 72 - DNA, 17546 bp, synthetic construct
  source 1..17546: mol_type = other DNA
attcctgtggttggcatgcacatacaaatggacgaacggataaaccttttcacgcccttttaaatatccgattattctaataaacgctcttttctcttaggtttacccgccaatatatcctgtcaaacactgatagtttaaactggcactagcctaacggtgttgactaactaggccgcttccctaattagctaacccgggggcgcgccgggaccggaattcattatgtggtctaggtaggttctatatataagaaaacttgaaatgttctaaaaaaaaattcaagcccatgcatgattgaagcaaacggtatagcaacggtgttaacctgatctagtgatctcttgcaatccttaacggccacctaccgcaggtagcaaacggcgtccccctcctcgatatctccgcggcgacctctggctttttccgcggaattgcgcggtggggacggattccacgagaccgcgacgcaaccgcctctcgccgctgggccccacaccgctcggtgccgtagcctcacgggactctttctccctcctcccccgttataaattggcttcatcccctccttgcctcatccatccaaatcccagtccccaatcccatcccttcgtaggagaaattcatcgaagctaagcgaatcctcgcgatcctctcaaggtactgcgagttttcgatccccctctcgacccctcgtatgtttgtgtttgtcgtagcgtttgattaggtatgctttccctgtttgtgttcgtcgtagcgtttgattaggtatgctttccctgttcgtgttcatcgtagtgtttgattaggtcgtgtgaggcgatggcctgctcgcgtccttcgatctgtagtcgatttgcgggtcgtggtgtagatctgcgggctgtgatgaagttatttggtgtgatctgctcgcctgattctgcgggttggctcgagtagatatgatggttggaccggttggttcgtttaccgcgctagggttgggctgggatgatgttgcatgcgccgttgcgcgtgatcccgcagcaggacttgcgtttgattgccagatctcgttacgattatgtgatttggtttggactttttagatctgtagcttctgcttatgtgccagatgcgcctactgctcatatgcctgatgataatcataaatggctgtggaactaactagttgattgcggagtcatgtatcagctacaggtgtagggactagctacaggtgtagggacttgcgtctaattgtttggtcctttactcatgttgcaattatgcaatttagtttagattgtttgttccactcatctaggctgtaaaagggacactgcttagattgctgtttaatctttttagtagattatattatattggtaacttattacccctattacatgccatacgtgacttctgctcatgcctgatgataatcatagatcactgtggaattaattagttgattgttgaatcatgtttcatgtacataccacggcacaattgcttagttccttaacaaatgcaaattttactgatccatgtatgatttgcgtggttctctaatgtgaaatactatagctacttgttagtaagaatcaggttcgtatgcttaatgctgtatgtgccttctgctcatgcctgatgataatcatatatcactggaattaattagttgatcgtttaatcatatatcaagtacataccatgccacaatttttagtcacttaacccatgcagattgaactggtccctgcatgttttgctaaattgttctattctgattagaccatatatcatgtatttttttttggtaatggttctcttattttaaatgctatatagttctggtacttgttagaaagatctgcttcatagtttagttgcctatccctcgaattaggatgctgagcagctgatcctatagctttgtttcatgtatcaattcttttgtgttcaacagtcagtttttgttagattcattgtaacttatggtcgcttactcttctggtcctcaatgcttgcagggatcccctaaatagaccatgccgaagaagaagcgcaaggtcgggggcgggggctcaggcgggggcgggagcggcggcgggggctctgggggcggcggcagcggcgggggcggcagcgggggcggcgggtcgatgctgttccaggatttcactcatctgtaccctctctcaaagactgttcggttcgagctcaagcctattgggcggactctggagcacatccacgcgaagaacttcctcagccaggacgaaaccatggccgacatgtaccagaaggtcaaggtcatcctcgacgactaccacagggacttcatcgcggacatgatgggcgaggtgaagctgacgaagctcgccgagttctacgacgtctacctcaagttccgcaagaacccgaaggacgacggcctccagaagcagctcaaggacctgcaggccgtcctgaggaaggagtccgtcaagcccatcggcagcggcggcaagtacaagaccggctacgacaggctgttcggcgccaagctgttcaaggacggcaaggagctcggcgacctggcgaagttcgtgatcgcgcaggagggcgagagctcccccaagctggcccacctggcccacttcgagaagttcagcacgtacttcaccggcttccacgacaacaggaagaacatgtacagcgacgaggacaagcacacggccatcgcctaccgcctcatccacgagaacctgccccgcttcatcgacaacctgcagatcctgacgaccatcaagcagaagcactccgccctgtacgaccagatcatcaacgagctcaccgcgagcggcctcgacgtgtccctcgccagccacctcgacggctaccacaagctcctgacccaggagggcatcaccgcctacaaccgcatcatcggcgaggtgaacggctacaccaacaagcacaaccagatctgccacaagtccgagaggatcgccaagctcaggcccctgcacaagcagatcctcagcgacggcatgggcgtgagcttcctcccgtccaagttcgccgacgactccgagatgtgccaggccgtgaacgagttctacaggcactacaccgacgtgttcgccaaggtgcagtccctgttcgacggcttcgacgaccaccagaaggacggcatctacgtggagcacaagaacctgaacgagctgtccaagcaggccttcggcgacttcgccctcctgggccgcgtgctggacggctactacgtggacgtcgtgaacccggagttcaacgagcgcttcgcgaaggcgaagacggacaacgcgaaggccaagctcaccaaggagaaggacaagttcatcaagggcgtccacagcctcgcgtccctggagcaggcgatcgagcaccacaccgcgcgccacgacgacgagtccgtgcaggccggcaagctcggccagtacttcaagcacggcctggccggcgtcgacaacccgatccagaagatccacaacaaccactccaccatcaagggcttcctggagagggagcgcccggcgggcgagcgcgcgctccccaagatcaagtccggcaagaaccccgagatgacgcagctcaggcagctgaaggagctgctcgacaacgcgctcaacgtggcgcacttcgccaagctgctcacgaccaagaccacgctggacaaccaggacggcaacttctacggcgagttcggcgtcctgtacgacgagctggcgaagatcccgaccctgtacaacaaggtccgcgactacctgagccagaagcccttctccaccgagaagtacaagctcaacttcggcaacccgaccctcctgaacggctgggacctcaacaaggagaaggacaacttcggcgtgatcctccagaaggacggctgctactacctcgccctgctggacaaggcgcacaagaaggtcttcgacaacgccccgaacaccggcaagaacgtgtaccagaagatggtgtacaagctgctccccggccccaacaagatgctgccgaaggtgttcttcgcgaagtccaacctcgactactacaaccccagcgccgagctcctggacaagtacgccaagggcacgcacaagaagggcgacaacttcaacctcaaggactgccacgcgctgatcgacttcttcaaggcgggcatcaacaagcaccccgagtggcagcacttcggcttcaagttcagcccgacctccagctacagggacctcagcgacttctaccgcgaggtggagccccagggctaccaggtgaagttcgtcgacatcaacgccgactacatcgacgagctcgtcgagcagggcaagctctacctgttccagatctacaacaaggacttctccccgaaggcccacggcaagccgaacctccacacgctctacttcaaggccctcttcagcgaggacaacctggccgacccgatctacaagctcaacggcgaggcgcagatcttctaccgcaaggccagcctggacatgaacgaaacgaccatccacagggccggcgaggtcctggagaacaagaacccggacaacccgaagaagaggcagttcgtctacgacatcatcaaggacaagaggtacacccaggacaagttcatgctccacgtcccgatcaccatgaacttcggcgtccagggcatgaccatcaaggagttcaacaagaaggtcaaccagagcatccagcagtacgacgaggtgaacgtcatcggcatcgaccgcggcgagaggcacctgctctacctgacggtcatcaactccaagggcgagatcctcgagcagcgcagcctgaacgacatcacgaccgcgagcgccaacggcacgcaggtcaccacgccgtaccacaagatcctcgacaagcgcgagatcgagaggctgaacgcgcgcgtcggctggggcgagatcgaaacgatcaaggagctcaagtccggctacctcagccacgtcgtgcaccagatcaaccagctcatgctgaagtacaacgcgatcgtggtcctcgaggacctgaacttcggcttcaagaggggccgcttcaaggtggagaagcagatctaccagaacttcgagaacgccctgatcaagaagctcaaccacctggtcctcaaggacaaggcggacgacgagatcggcagctacaagaacgcgctccagctgaccaacaacttcacggacctcaagtccatcggcaagcagacgggcttcctgttctacgtgccggcgtggctcacgtccaagatcgaccccagcaccggcttcgtcaacctcctgaagacgaagtacacctccatcgccgacagcaagaagttcatctccagcttcgaccgcatcatgtatgtgccggaggaggacctgttcgagttcgccctcgactacaagaacttctcccgcacggacgcggactacatcaagaagtggaagctgtacagctacggcaaccgcatccgcatcttcaggaaccccaagaagaacaacgtcttcgactgggaggaggtgtgcctgacctccgcgtacaaggagctcttcaacaagtacggcatcaactaccagcagggcgacatcagggctctcctgtgcgagcagagcgacaaggccttctactccagcttcatggcgctgatgtccctcatgctgcagatgaggaactcgatcaccggcaggacggacgtggacttcctcatctccccggtgaagaacagcgacggcatcttctacgactccaggaactacgaggcccaggagaacgcgatcctcccaaagaacgcggacgcgaacggcgcctaccacatcgccctcaagggcctgtggctgctcaacgagctcaagaactccgacgacctgaacaaggtgaagctcgccattgacaaccagacgtggctgaatttcgctcagaatagggggggcgggggctcaggcgggggcgggagcggcggcgggggctctgggggcggcggcagcggcgggggcggcagcgggggcggcgggtcgccgaagaagaagcgcaaggtgtccggcggcagctccggcggcagcccgaagaagaagcgcaaagtgtgagggacccgatcgttcaaacatttggcaataaagtttcttaagattgaatcctgttgccggtcttgcgatgattatcatataatttctgttgaattacgttaagcatgtaataattaacatgtaatgcatgacgttatttatgagatgggtttttatgattagagtcccgcaattatacatttaatacgcgatagaaaacaaaatatagcgcgcaaactaggataaattatcgcgcgcggtgtcatctatgttactagatcggtaccgaattcattatgtggtctaggtaggttctatatataagaaaacttgaaatgttctaaaaaaaaattcaagcccatgcatgattgaagcaaacggtatagcaacggtgttaacctgatctagtgatctcttgcaatccttaacggccacctaccgcaggtagcaaacggcgtccccctcctcgatatctccgcggcgacctctggctttttccgcggaattgcgcggtggggacggattccacgagaccgcgacgcaaccgcctctcgccgctgggccccacaccgctcggtgccgtagcctcacgggactctttctccctcctcccccgttataaattggcttcatcccctccttgcctcatccatccaaatcccagtccccaatcccatcccttcgtaggagaaattcatcgaagctaagcgaatcctcgcgatcctctcaaggtactgcgagttttcgatccccctctcgacccctcgtatgtttgtgtttgtcgtagcgtttgattaggtatgctttccctgtttgtgttcgtcgtagcgtttgattaggtatgctttccctgttcgtgttcatcgtagtgtttgattaggtcgtgtgaggcgatggcctgctcgcgtccttcgatctgtagtcgatttgcgggtcgtggtgtagatctgcgggctgtgatgaagttatttggtgtgatctgctcgcctgattctgcgggttggctcgagtagatatgatggttggaccggttggttcgtttaccgcgctagggttgggctgggatgatgttgcatgcgccgttgcgcgtgatcccgcagcaggacttgcgtttgattgccagatctcgttacgattatgtgatttggtttggactttttagatctgtagcttctgcttatgtgccagatgcgcctactgctcatatgcctgatgataatcataaatggctgtggaactaactagttgattgcggagtcatgtatcagctacaggtgtagggactagctacaggtgtagggacttgcgtctaattgtttggtcctttactcatgttgcaattatgcaatttagtttagattgtttgttccactcatctaggctgtaaaagggacactgcttagattgctgtttaatctttttagtagattatattatattggtaacttattacccctattacatgccatacgtgacttctgctcatgcctgatgataatcatagatcactgtggaattaattagttgattgttgaatcatgtttcatgtacataccacggcacaattgcttagttccttaacaaatgcaaattttactgatccatgtatgatttgcgtggttctctaatgtgaaatactatagctacttgttagtaagaatcaggttcgtatgcttaatgctgtatgtgccttctgctcatgcctgatgataatcatatatcactggaattaattagttgatcgtttaatcatatatcaagtacataccatgccacaatttttagtcacttaacccatgcagattgaactggtccctgcatgttttgctaaattgttctattctgattagaccatatatcatgtatttttttttggtaatggttctcttattttaaatgctatatagttctggtacttgttagaaagatctgcttcatagtttagttgcctatccctcgaattaggatgctgagcagctgatcctatagctttgtttcatgtatcaattcttttgtgttcaacagtcagtttttgttagattcattgtaacttatggtcgcttactcttctggtcctcaatgcttgcagaagcttgaaattctgatgagtccgtgaggacgaaacgagtaagctcgtcaatttctactgtttgtagatgggaaagaccgaggagaagatctaatttctactgtttgtagatgcaccaaggaaggggaggagatcaatttctactgtttgtagatgtcacagatcacaaacttcaaatgaatttctactgtttgtagatacgcccagaaagcatacgcagtcggccggcatggtcccagcctcctcgctggcgccggctgggcaacatgcttcggcatggcgaatgggacgatcgttcaaacatttggcaataaagtttcttaagattgaatcctgttgccggtcttgcgatgattatcatataatttctgttgaattacgttaagcatgtaataattaacatgtaatgcatgacgttatttatgagatgggtttttatgattagagtcccgcaattatacatttaatacgcgatagaaaacaaaatatagcgcgcaaactaggataaattatcgcgcgcggtgtcatctatgttactagatccctaggctgcagtgcagcgtgacccggtcgtgcccctctctagagataatgagcattgcatgtctaagttataaaaaattaccacatattttttttgtcacacttgtttgaagtgcagtttatctatctttatacatatatttaaactttactctacgaataatataatctatagtactacaataatatcagtgttttagagaatcatataaatgaacagttagacatggtctaaaggacaattgagtattttgacaacaggactctacagttttatctttttagtgtgcatgtgttctcctttttttttgcaaatagcttcacctatataatacttcatccattttattagtacatccatttagggtttagggttaatggtttttatagactaatttttttagtacatctattttattctattttagcctctaaattaagaaaactaaaactctattttagtttttttatttaataatttagatataaaatagaataaaataaagtgactaaaaattaaacaaataccctttaagaaattaaaaaaactaaggaaacatttttcttgtttcgagtagataatgccagcctgttaaacgccgtcgacgagtctaacggacaccaaccagcgaaccagcagcgtcgcgtcgggccaagcgaagcagacggcacggcatctctgtcgctgcctctggacccctctcgagagttccgctccaccgttggacttgctccgctgtcggcatccagaaattgcgtggcggagcggcagacgtgagccggcacggcaggcggcctcctcctcctctcacggcaccggcagctacgggggattcctttcccaccgctccttcgctttcccttcctcgcccgccgtaataaatagacaccccctccacaccctctttccccaacctcgtgttgttcggagcgcacacacacacaaccagatctcccccaaatccacccgtcggcacctccgcttcaaggtacgccgctcgtcctccccccccccccctctctaccttctctagatcggcgttccggtccatggttagggcccggtagttctacttctgttcatgtttgtgttagatccgtgtttgtgttagatccgtgctgctagcgttcgtacacggatgcgacctgtacgtcagacacgttctgattgctaacttgccagtgtttctctttggggaatcctgggatggctctagccgttccgcagacgggatcgatttcatgattttttttgtttcgttgcatagggtttggtttgcccttttcctttatttcaatatatgccgtgcacttgtttgtcgggtcatcttttcatgcttttttttgtcttggttgtgatgatgtggtctggttgggcggtcgttctagatcggagtagaattctgtttcaaactacctggtggatttattaattttggatctgtatgtgtgtgccatacatattcatagttacgaattgaagatgatggatggaaatatcgatctaggataggtatacatgttgatgcgggttttactgatgcatatacagagatgctttttgttcgcttggttgtgatgatgtggtgtggttgggcggtcgttcattcgttctagatcggagtagaatactgtttcaaactacctggtgtatttattaattttggaactgtatgtgtgtgtcatacatcttcatagttacgagtttaagatggatggaaatatcgatctaggataggtatacatgttgatgtgggttttactgatgcatatacatgatggcatatgcagcatctattcatatgctctaaccttgagtacctatctattataataaacaagtatgttttataattattttgatcttgatatacttggatgatggcatatgcagcagctatatgtggatttttttagccctgccttcatacgctatttatttgcttggtactgtttcttttgtcgatgctcaccctgttgtttggtgttacttctgcagggatcaccgatcatgcaaaaactcattaactcagtgcaaaactatgcctggggcagcaaaacggcgttgactgaactttatggtatggaaaatccgtccagccagccgatggccgagctgtggatgggcgcacatccgaaaagcagttcacgagtgcagaatgccgccggagatatcgtttcactgcgtgatgtgattgagagtgataaatcgactctgctcggagaggccgttgccaaacgctttggcgaactgcctttcctgttcaaagtattatgcgcagcacagccactctccattcaggttcatccaaacaaacacaattctgaaatcggttttgccaaagaaaatgccgcaggtatcccgatggatgccgccgagcgtaactataaagatcctaaccacaagccggagctggtttttgcgctgacgcctttccttgcgatgaacgcgtttcgtgaattttccgagattgtctccctactccagccggtcgcaggtgcacatccggcgattgctcactttttacaacagcctgatgccgaacgtttaagcgaactgttcgccagcctgttgaatatgcagggtgaagaaaaatcccgcgcgctggcgattttaaaatcggccctcgatagccagcagggtgaaccgtggcaaacgattcgtttaatttctgaattttacccggaagacagcggtctgttctccccgctattgctgaatgtggtgaaattgaaccctggcgaagcgatgttcctgttcgctgaaacaccgcacgcttacctgcaaggcgtggcgctggaagtgatggcaaactccgataacgtgctgcgtgcgggtctgacgcctaaatacattgatattccggaactggttgccaatgtgaaattcgaagccaaaccggctaaccagttgttgacccagccggtgaaacaaggtgcagaactggacttcccgattccagtggatgattttgccttctcgctgcatgaccttagtgataaagaaaccaccattagccagcagagtgccgccattttgttctgcgtcgaaggcgatgcaacgttgtggaaaggttctcagcagttacagcttaaaccgggtgaatcagcgtttattgccgccaacgaatcaccggtgactgtcaaaggccacggccgtttagcgcgtgtttacaacaagctgtaagagcttactgaaaaaattaacatctcttgctaagctgggagctcgatccgtcgacctgcagatcgttcaaacatttggcaataaagtttcttaagattgaatcctgttgccggtcttgcgatgattatcatataatttctgttgaattacgttaagcatgtaataattaacatgtaatgcatgacgttatttatgagatgggtttttatgattagagtcccgcaattatacatttaatacgcgatagaaaacaaaatatagcgcgcaaactaggataaattatcgcgcgcggtgtcatctatgttactagatccggaccgcctgcaggcccgggggcgcgccctaattagctaacggccaggatcgccgcgtgagcctttagcaactagctagattaattaacgcaatctgttattaagttgtctaagcgtcaatttgtttacaccacaatatatcctgccaccagccagccaacagctccccgaccggcagctcggcacaaaatcaccactcgatacaggcagcccatcagaattaattctcatgtttgacagcttatcatcgactgcacggtgcaccaatgcttctggcgtcaggcagccatcggaagctgtggtatggctgtgcaggtcgtaaatcactgcataattcgtgtcgctcaaggcgcactcccgttctggataatgttttttgcgccgacatcataacggttctggcaaatattctgaaatgagctgttgacaattaatcatccggctcgtataatgtgtggaattgtgagcggataacaatttcacacaggaaacagaccatgagggaagcgttgatcgccgaagtatcgactcaactatcagaggtagttggcgtcatcgagcgccatctcgaaccgacgttgctggccgtacatttgtacggctccgcagtggatggcggcctgaagccacacagtgatattgatttgctggttacggtgaccgtaaggcttgatgaaacaacgcggcgagctttgatcaacgaccttttggaaacttcggcttcccctggagagagcgagattctccgcgctgtagaagtcaccattgttgtgcacgacgacatcattccgtggcgttatccagctaagcgcgaactgcaatttggagaatggcagcgcaatgacattcttgcaggtatcttcgagccagccacgatcgacattgatctggctatcttgctgacaaaagcaagagaacatagcgttgccttggtaggtccagcggcggaggaactctttgatccggttcctgaacaggatctatttgaggcgctaaatgaaaccttaacgctatggaactcgccgcccgactgggctggcgatgagcgaaatgtagtgcttacgttgtcccgcatttggtacagcgcagtaaccggcaaaatcgcgccgaaggatgtcgctgccgactgggcaatggagcgcctgccggcccagtatcagcccgtcatacttgaagctaggcaggcttatcttggacaagaagatcgcttggcctcgcgcgcagatcagttggaagaatttgttcactacgtgaaaggcgagatcaccaaagtagtcggcaaataaagctctagtggatctccgtacccagggatctggctcgcggcggacgcacgacgccggggcgagaccataggcgatctcctaaatcaatagtagctgtaacctcgaagcgtttcacttgtaacaacgattgagaatttttgtcataaaattgaaatacttggttcgcatttttgtcatccgcggtcagccgcaattctgacgaactgcccatttagctggagatgattgtacatccttcacgtgaaaatttctcaagcgctgtgaacaagggttcagattttagattgaaaggtgagccgttgaaacacgttcttcttgtcgatgacgacgtcgctatgcggcatcttattattgaataccttacgatccacgccttcaaagtgaccgcggtagccgacagcacccagttcacaagagtactctcttccgcgacggtcgatgtcgtggttgttgatctagatttaggtcgtgaagatgggctcgagatcgttcgtaatctggcggcaaagtctgatattccaatcataattatcagtggcgaccgccttgaggagacggataaagttgttgcactcgagctaggagcaagtgattttatcgctaagccgttcagtatcagagagtttctagcacgcattcgggttgccttgcgcgtgcgccccaacgttgtccgctccaaagaccgacggtctttttgttttactgactggacacttaatctcaggcaacgtcgcttgatgtccgaagctggcggtgaggtgaaacttacggcaggtgagttcaatcttctcctcgcgtttttagagaaaccccgcgacgttctatcgcgcgagcaacttctcattgccagtcgagtacgcgacgaggaggtttatgacaggagtatagatgttctcattttgaggctgcgccgcaaacttgaggcagatccgtcaagccctcaactgataaaaacagcaagaggtgccggttatttctttgacgcggacgtgcaggtttcgcacggggggacgatggcagcctgagccaattcccagatccccgaggaatcggcgtgagcggtcgcaaaccatccggcccggtacaaatcggcgcggcgctgggtgatgacctggtggagaagttgaaggccgcgcaggccgcccagcggcaacgcatcgaggcagaagcacgccccggtgaatcgtggcaagcggccgctgatcgaatccgcaaagaatcccggcaaccgccggcagccggtgcgccgtcgattaggaagccgcccaagggcgacgagcaaccagattttttcgttccgatgctctatgacgtgggcacccgcgatagtcgcagcatcatggacgtggccgttttccgtctgtcgaagcgtgaccgacgagctggcgaggtgatccgctacgagcttccagacgggcacgtagaggtttccgcagggccggccggcatggccagtgtgtgggattacgacctggtactgatggcggtttcccatctaaccgaatccatgaaccgataccgggaagggaagggagacaagcccggccgcgtgttccgtccacacgttgcggacgtactcaagttctgccggcgagccgatggcggaaagcagaaagacgacctggtagaaacctgcattcggttaaacaccacgcacgttgccatgcagcgtacgaagaaggccaagaacggccgcctggtgacggtatccgagggtgaagccttgattagccgctacaagatcgtaaagagcgaaaccgggcggccggagtacatcgagatcgagctggctgattggatgtaccgcgagatcacagaaggcaagaacccggacgtgctgacggttcaccccgattactttttgatcgatcccggcatcggccgttttctctaccgcctggcacgccgcgccgcaggcaaggcagaagccagatggttgttcaagacgatctacgaacgcagtggcagcgccggagagttcaagaagttctgtttcaccgtgcgcaagctgatcgggtcaaatgacctgccggagtacgatttgaaggaggaggcggggcaggctggcccgatcctagtcatgcgctaccgcaacctgatcgagggcgaagcatccgccggttcctaatgtacggagcagatgctagggcaaattgccctagcaggggaaaaaggtcgaaaaggtctctttcctgtggatagcacgtacattgggaacccaaagccgtacattgggaaccggaacccgtacattgggaacccaaagccgtacattgggaaccggtcacacatgtaagtgactgatataaaagagaaaaaaggcgatttttccgcctaaaactctttaaaacttattaaaactcttaaaacccgcctggcctgtgcataactgtctggccagcgcacagccgaagagctgcaaaaagcgcctacccttcggtcgctgcgctccctacgccccgccgcttcgcgtcggcctatcgcggccgctggccgctcaaaaatggctggcctacggccaggcaatctaccagggcgcggacaagccgcgccgtcgccactcgaccgccggcgctgaggtctgcctcgtgaagaaggtgttgctgactcataccaggcctgaatcgccccatcatccagccagaaagtgagggagccacggttgatgagagctttgttgtaggtggaccagttggtgattttgaacttttgctttgccacggaacggtctgcgttgtcgggaagatgcgtgatctgatccttcaactcagcaaaagttcgatttattcaacaaagccgccgtcccgtcaagtcagcgtaatgctctgccagtgttacaaccaattaaccaattctgattagaaaaactcatcgagcatcaaatgaaactgcaatttattcatatcaggattatcaataccatatttttgaaaaagccgtttctgtaatgaaggagaaaactcaccgaggcagttccataggatggcaagatcctggtatcggtctgcgattccgactcgtccaacatcaatacaacctattaatttcccctcgtcaaaaataaggttatcaagtgagaaatcaccatgagtgacgactgaatccggtgagaatggcaaaagctctgcattaatgaatcggccaacgcgcggggagaggcggtttgcgtattgggcgctcttccgcttcctcgctcactgactcgctgcgctcggtcgttcggctgcggcgagcggtatcagctcactcaaaggcggtaatacggttatccacagaatcaggggataacgcaggaaagaacatgtgagcaaaaggccagcaaaaggccaggaaccgtaaaaaggccgcgttgctggcgtttttccataggctccgcccccctgacgagcatcacaaaaatcgacgctcaagtcagaggtggcgaaacccgacaggactataaagataccaggcgtttccccctggaagctccctcgtgcgctctcctgttccgaccctgccgcttaccggatacctgtccgcctttctcccttcgggaagcgtggcgctttctcatagctcacgctgtaggtatctcagttcggtgtaggtcgttcgctccaagctgggctgtgtgcacgaaccccccgttcagcccgaccgctgcgccttatccggtaactatcgtcttgagtccaacccggtaagacacgacttatcgccactggcagcagccactggtaacaggattagcagagcgaggtatgtaggcggtgctacagagttcttgaagtggtggcctaactacggctacactagaagaacagtatttggtatctgcgctctgctgaagccagttaccttcggaaaaagagttggtagctcttgatccggcaaacaaaccaccgctggtagcggtggtttttttgtttgcaagcagcagattacgcgcagaaaaaaaggatctcaagaagatcctttgatcttttctacggggtctgacgctcagtggaacgaaaactcacgttaagggattttggtcatgagattatcaaaaaggatcttcacctagatccttttgatccggaatta

SEQ ID NO: 73 - DNA, 17588 bp, synthetic construct
  source 1..17588: mol_type = other DNA
attcctgtggttggcatgcacatacaaatggacgaacggataaaccttttcacgcccttttaaatatccgattattctaataaacgctcttttctcttaggtttacccgccaatatatcctgtcaaacactgatagtttaaactggcactagcctaacggtgttgactaactaggccgcttccctaattagctaacccgggggcgcgccgggaccggaattcattatgtggtctaggtaggttctatatataagaaaacttgaaatgttctaaaaaaaaattcaagcccatgcatgattgaagcaaacggtatagcaacggtgttaacctgatctagtgatctcttgcaatccttaacggccacctaccgcaggtagcaaacggcgtccccctcctcgatatctccgcggcgacctctggctttttccgcggaattgcgcggtggggacggattccacgagaccgcgacgcaaccgcctctcgccgctgggccccacaccgctcggtgccgtagcctcacgggactctttctccctcctcccccgttataaattggcttcatcccctccttgcctcatccatccaaatcccagtccccaatcccatcccttcgtaggagaaattcatcgaagctaagcgaatcctcgcgatcctctcaaggtactgcgagttttcgatccccctctcgacccctcgtatgtttgtgtttgtcgtagcgtttgattaggtatgctttccctgtttgtgttcgtcgtagcgtttgattaggtatgctttccctgttcgtgttcatcgtagtgtttgattaggtcgtgtgaggcgatggcctgctcgcgtccttcgatctgtagtcgatttgcgggtcgtggtgtagatctgcgggctgtgatgaagttatttggtgtgatctgctcgcctgattctgcgggttggctcgagtagatatgatggttggaccggttggttcgtttaccgcgctagggttgggctgggatgatgttgcatgcgccgttgcgcgtgatcccgcagcaggacttgcgtttgattgccagatctcgttacgattatgtgatttggtttggactttttagatctgtagcttctgcttatgtgccagatgcgcctactgctcatatgcctgatgataatcataaatggctgtggaactaactagttgattgcggagtcatgtatcagctacaggtgtagggactagctacaggtgtagggacttgcgtctaattgtttggtcctttactcatgttgcaattatgcaatttagtttagattgtttgttccactcatctaggctgtaaaagggacactgcttagattgctgtttaatctttttagtagattatattatattggtaacttattacccctattacatgccatacgtgacttctgctcatgcctgatgataatcatagatcactgtggaattaattagttgattgttgaatcatgtttcatgtacataccacggcacaattgcttagttccttaacaaatgcaaattttactgatccatgtatgatttgcgtggttctctaatgtgaaatactatagctacttgttagtaagaatcaggttcgtatgcttaatgctgtatgtgccttctgctcatgcctgatgataatcatatatcactggaattaattagttgatcgtttaatcatatatcaagtacataccatgccacaatttttagtcacttaacccatgcagattgaactggtccctgcatgttttgctaaattgttctattctgattagaccatatatcatgtatttttttttggtaatggttctcttattttaaatgctatatagttctggtacttgttagaaagatctgcttcatagtttagttgcctatccctcgaattaggatgctgagcagctgatcctatagctttgtttcatgtatcaattcttttgtgttcaacagtcagtttttgttagattcattgtaacttatggtcgcttactcttctggtcctcaatgcttgcagggatcccctaaatagaccatgccgaagaagaagcgcaaggtcgggggcgggggctcaggcgggggcgggagcggcggcgggggctctgggggcggcggcagcggcgggggcggcagcgggggcggcgggtcgatgctgttccaggatttcactcatctgtaccctctctcaaagactgttcggttcgagctcaagcctattgggcggactctggagcacatccacgcgaagaacttcctcagccaggacgaaaccatggccgacatgtaccagaaggtcaaggtcatcctcgacgactaccacagggacttcatcgcggacatgatgggcgaggtgaagctgacgaagctcgccgagttctacgacgtctacctcaagttccgcaagaacccgaaggacgacggcctccagaagcagctcaaggacctgcaggccgtcctgaggaaggagtccgtcaagcccatcggcagcggcggcaagtacaagaccggctacgacaggctgttcggcgccaagctgttcaaggacggcaaggagctcggcgacctggcgaagttcgtgatcgcgcaggagggcgagagctcccccaagctggcccacctggcccacttcgagaagttcagcacgtacttcaccggcttccacgacaacaggaagaacatgtacagcgacgaggacaagcacacggccatcgcctaccgcctcatccacgagaacctgccccgcttcatcgacaacctgcagatcctgacgaccatcaagcagaagcactccgccctgtacgaccagatcatcaacgagctcaccgcgagcggcctcgacgtgtccctcgccagccacctcgacggctaccacaagctcctgacccaggagggcatcaccgcctacaaccgcatcatcggcgaggtgaacggctacaccaacaagcacaaccagatctgccacaagtccgagaggatcgccaagctcaggcccctgcacaagcagatcctcagcgacggcatgggcgtgagcttcctcccgtccaagttcgccgacgactccgagatgtgccaggccgtgaacgagttctacaggcactacaccgacgtgttcgccaaggtgcagtccctgttcgacggcttcgacgaccaccagaaggacggcatctacgtggagcacaagaacctgaacgagctgtccaagcaggccttcggcgacttcgccctcctgggccgcgtgctggacggctactacgtggacgtcgtgaacccggagttcaacgagcgcttcgcgaaggcgaagacggacaacgcgaaggccaagctcaccaaggagaaggacaagttcatcaagggcgtccacagcctcgcgtccctggagcaggcgatcgagcaccacaccgcgcgccacgacgacgagtccgtgcaggccggcaagctcggccagtacttcaagcacggcctggccggcgtcgacaacccgatccagaagatccacaacaaccactccaccatcaagggcttcctggagagggagcgcccggcgggcgagcgcgcgctccccaagatcaagtccggcaagaaccccgagatgacgcagctcaggcagctgaaggagctgctcgacaacgcgctcaacgtggcgcacttcgccaagctgctcacgaccaagaccacgctggacaaccaggacggcaacttctacggcgagttcggcgtcctgtacgacgagctggcgaagatcccgaccctgtacaacaaggtccgcgactacctgagccagaagcccttctccaccgagaagtacaagctcaacttcggcaacccgaccctcctgaacggctgggacctcaacaaggagaaggacaacttcggcgtgatcctccagaaggacggctgctactacctcgccctgctggacaaggcgcacaagaaggtcttcgacaacgccccgaacaccggcaagaacgtgtaccagaagatggtgtacaagctgctccccggccccaacaagatgctgccgaaggtgttcttcgcgaagtccaacctcgactactacaaccccagcgccgagctcctggacaagtacgccaagggcacgcacaagaagggcgacaacttcaacctcaaggactgccacgcgctgatcgacttcttcaaggcgggcatcaacaagcaccccgagtggcagcacttcggcttcaagttcagcccgacctccagctacagggacctcagcgacttctaccgcgaggtggagccccagggctaccaggtgaagttcgtcgacatcaacgccgactacatcgacgagctcgtcgagcagggcaagctctacctgttccagatctacaacaaggacttctccccgaaggcccacggcaagccgaacctccacacgctctacttcaaggccctcttcagcgaggacaacctggccgacccgatctacaagctcaacggcgaggcgcagatcttctaccgcaaggccagcctggacatgaacgaaacgaccatccacagggccggcgaggtcctggagaacaagaacccggacaacccgaagaagaggcagttcgtctacgacatcatcaaggacaagaggtacacccaggacaagttcatgctccacgtcccgatcaccatgaacttcggcgtccagggcatgaccatcaaggagttcaacaagaaggtcaaccagagcatccagcagtacgacgaggtgaacgtcatcggcatcgaccgcggcgagaggcacctgctctacctgacggtcatcaactccaagggcgagatcctcgagcagcgcagcctgaacgacatcacgaccgcgagcgccaacggcacgcaggtcaccacgccgtaccacaagatcctcgacaagcgcgagatcgagaggctgaacgcgcgcgtcggctggggcgagatcgaaacgatcaaggagctcaagtccggctacctcagccacgtcgtgcaccagatcaaccagctcatgctgaagtacaacgcgatcgtggtcctcgaggacctgaacttcggcttcaagaggggccgcttcaaggtggagaagcagatctaccagaacttcgagaacgccctgatcaagaagctcaaccacctggtcctcaaggacaaggcggacgacgagatcggcagctacaagaacgcgctccagctgaccaacaacttcacggacctcaagtccatcggcaagcagacgggcttcctgttctacgtgccggccccatatacctcaaagattgatcccttgaccggattcgtggacccgtttgtctggaagaccatcaagaaccatgagtcgcgtaagcatttcctggagggtttcgacttcctgcactatgatgtaaaaaccggagacttcatcctgcatttcaagatgaatcggaacctctccttccagcggggactccctggcttcatgcccgcttgggatatcgtttttgagaaaaatgaaacccaattcgacgccaaaggcacgcctttcatcgcgggcaagaggattgtccctgtaattgagaaccatagattcaccgggcgttaccgtgacctgtaccccgcaaacgaactcatcgccctcctggaggagaaaggcatcgttttccgcgacgggtcaaatatcctccccaaactgctcgagaacgatgatagccacgctattgacacgatggtagcgctcatcagatccgtgctgcaaatgagaaattcaaatgctgccactggggaggattacatcaactcccctgtgcgtgatctcaatggcgtgtgcttcgattctagatttcagaatcctgagtggccgatggatgccgacgcgaacggcgcctaccacatcgccctcaagggcctgtggctgctcaacgagctcaagaactccgacgacctgaacaaggtgaagctcgccattgacaaccagacgtggctgaatttcgctcagaatagggggggcgggggctcaggcgggggcgggagcggcggcgggggctctgggggcggcggcagcggcgggggcggcagcgggggcggcgggtcgccgaagaagaagcgcaaggtgtccggcggcagctccggcggcagcccgaagaagaagcgcaaagtgtgagggacccgatcgttcaaacatttggcaataaagtttcttaagattgaatcctgttgccggtcttgcgatgattatcatataatttctgttgaattacgttaagcatgtaataattaacatgtaatgcatgacgttatttatgagatgggtttttatgattagagtcccgcaattatacatttaatacgcgatagaaaacaaaatatagcgcgcaaactaggataaattatcgcgcgcggtgtcatctatgttactagatcggtaccgaattcattatgtggtctaggtaggttctatatataagaaaacttgaaatgttctaaaaaaaaattcaagcccatgcatgattgaagcaaacggtatagcaacggtgttaacctgatctagtgatctcttgcaatccttaacggccacctaccgcaggtagcaaacggcgtccccctcctcgatatctccgcggcgacctctggctttttccgcggaattgcgcggtggggacggattccacgagaccgcgacgcaaccgcctctcgccgctgggccccacaccgctcggtgccgtagcctcacgggactctttctccctcctcccccgttataaattggcttcatcccctccttgcctcatccatccaaatcccagtccccaatcccatcccttcgtaggagaaattcatcgaagctaagcgaatcctcgcgatcctctcaaggtactgcgagttttcgatccccctctcgacccctcgtatgtttgtgtttgtcgtagcgtttgattaggtatgctttccctgtttgtgttcgtcgtagcgtttgattaggtatgctttccctgttcgtgttcatcgtagtgtttgattaggtcgtgtgaggcgatggcctgctcgcgtccttcgatctgtagtcgatttgcgggtcgtggtgtagatctgcgggctgtgatgaagttatttggtgtgatctgctcgcctgattctgcgggttggctcgagtagatatgatggttggaccggttggttcgtttaccgcgctagggttgggctgggatgatgttgcatgcgccgttgcgcgtgatcccgcagcaggacttgcgtttgattgccagatctcgttacgattatgtgatttggtttggactttttagatctgtagcttctgcttatgtgccagatgcgcctactgctcatatgcctgatgataatcataaatggctgtggaactaactagttgattgcggagtcatgtatcagctacaggtgtagggactagctacaggtgtagggacttgcgtctaattgtttggtcctttactcatgttgcaattatgcaatttagtttagattgtttgttccactcatctaggctgtaaaagggacactgcttagattgctgtttaatctttttagtagattatattatattggtaacttattacccctattacatgccatacgtgacttctgctcatgcctgatgataatcatagatcactgtggaattaattagttgattgttgaatcatgtttcatgtacataccacggcacaattgcttagttccttaacaaatgcaaattttactgatccatgtatgatttgcgtggttctctaatgtgaaatactatagctacttgttagtaagaatcaggttcgtatgcttaatgctgtatgtgccttctgctcatgcctgatgataatcatatatcactggaattaattagttgatcgtttaatcatatatcaagtacataccatgccacaatttttagtcacttaacccatgcagattgaactggtccctgcatgttttgctaaattgttctattctgattagaccatatatcatgtatttttttttggtaatggttctcttattttaaatgctatatagttctggtacttgttagaaagatctgcttcatagtttagttgcctatccctcgaattaggatgctgagcagctgatcctatagctttgtttcatgtatcaattcttttgtgttcaacagtcagtttttgttagattcattgtaacttatggtcgcttactcttctggtcctcaatgcttgcagaagcttgaaattctgatgagtccgtgaggacgaaacgagtaagctcgtcaatttctactgtttgtagatgggaaagaccgaggagaagatctaatttctactgtttgtagatgcaccaaggaaggggaggagatcaatttctactgtttgtagatgtcacagatcacaaacttcaaatgaatttctactgtttgtagatacgcccagaaagcatacgcagtcggccggcatggtcccagcctcctcgctggcgccggctgggcaacatgcttcggcatggcgaatgggacgatcgttcaaacatttggcaataaagtttcttaagattgaatcctgttgccggtcttgcgatgattatcatataatttctgttgaattacgttaagcatgtaataattaacatgtaatgcatgacgttatttatgagatgggtttttatgattagagtcccgcaattatacatttaatacgcgatagaaaacaaaatatagcgcgcaaactaggataaattatcgcgcgcggtgtcatctatgttactagatccctaggctgcagtgcagcgtgacccggtcgtgcccctctctagagataatgagcattgcatgtctaagttataaaaaattaccacatattttttttgtcacacttgtttgaagtgcagtttatctatctttatacatatatttaaactttactctacgaataatataatctatagtactacaataatatcagtgttttagagaatcatataaatgaacagttagacatggtctaaaggacaattgagtattttgacaacaggactctacagttttatctttttagtgtgcatgtgttctcctttttttttgcaaatagcttcacctatataatacttcatccattttattagtacatccatttagggtttagggttaatggtttttatagactaatttttttagtacatctattttattctattttagcctctaaattaagaaaactaaaactctattttagtttttttatttaataatttagatataaaatagaataaaataaagtgactaaaaattaaacaaataccctttaagaaattaaaaaaactaaggaaacatttttcttgtttcgagtagataatgccagcctgttaaacgccgtcgacgagtctaacggacaccaaccagcgaaccagcagcgtcgcgtcgggccaagcgaagcagacggcacggcatctctgtcgctgcctctggacccctctcgagagttccgctccaccgttggacttgctccgctgtcggcatccagaaattgcgtggcggagcggcagacgtgagccggcacggcaggcggcctcctcctcctctcacggcaccggcagctacgggggattcctttcccaccgctccttcgctttcccttcctcgcccgccgtaataaatagacaccccctccacaccctctttccccaacctcgtgttgttcggagcgcacacacacacaaccagatctcccccaaatccacccgtcggcacctccgcttcaaggtacgccgctcgtcctccccccccccccctctctaccttctctagatcggcgttccggtccatggttagggcccggtagttctacttctgttcatgtttgtgttagatccgtgtttgtgttagatccgtgctgctagcgttcgtacacggatgcgacctgtacgtcagacacgttctgattgctaacttgccagtgtttctctttggggaatcctgggatggctctagccgttccgcagacgggatcgatttcatgattttttttgtttcgttgcatagggtttggtttgcccttttcctttatttcaatatatgccgtgcacttgtttgtcgggtcatcttttcatgcttttttttgtcttggttgtgatgatgtggtctggttgggcggtcgttctagatcggagtagaattctgtttcaaactacctggtggatttattaattttggatctgtatgtgtgtgccatacatattcatagttacgaattgaagatgatggatggaaatatcgatctaggataggtatacatgttgatgcgggttttactgatgcatatacagagatgctttttgttcgcttggttgtgatgatgtggtgtggttgggcggtcgttcattcgttctagatcggagtagaatactgtttcaaactacctggtgtatttattaattttggaactgtatgtgtgtgtcatacatcttcatagttacgagtttaagatggatggaaatatcgatctaggataggtatacatgttgatgtgggttttactgatgcatatacatgatggcatatgcagcatctattcatatgctctaaccttgagtacctatctattataataaacaagtatgttttataattattttgatcttgatatacttggatgatggcatatgcagcagctatatgtggatttttttagccctgccttcatacgctatttatttgcttggtactgtttcttttgtcgatgctcaccctgttgtttggtgttacttctgcagggatcaccgatcatgcaaaaactcattaactcagtgcaaaactatgcctggggcagcaaaacggcgttgactgaactttatggtatggaaaatccgtccagccagccgatggccgagctgtggatgggcgcacatccgaaaagcagttcacgagtgcagaatgccgccggagatatcgtttcactgcgtgatgtgattgagagtgataaatcgactctgctcggagaggccgttgccaaacgctttggcgaactgcctttcctgttcaaagtattatgcgcagcacagccactctccattcaggttcatccaaacaaacacaattctgaaatcggttttgccaaagaaaatgccgcaggtatcccgatggatgccgccgagcgtaactataaagatcctaaccacaagccggagctggtttttgcgctgacgcctttccttgcgatgaacgcgtttcgtgaattttccgagattgtctccctactccagccggtcgcaggtgcacatccggcgattgctcactttttacaacagcctgatgccgaacgtttaagcgaactgttcgccagcctgttgaatatgcagggtgaagaaaaatcccgcgcgctggcgattttaaaatcggccctcgatagccagcagggtgaaccgtggcaaacgattcgtttaatttctgaattttacccggaagacagcggtctgttctccccgctattgctgaatgtggtgaaattgaaccctggcgaagcgatgttcctgttcgctgaaacaccgcacgcttacctgcaaggcgtggcgctggaagtgatggcaaactccgataacgtgctgcgtgcgggtctgacgcctaaatacattgatattccggaactggttgccaatgtgaaattcgaagccaaaccggctaaccagttgttgacccagccggtgaaacaaggtgcagaactggacttcccgattccagtggatgattttgccttctcgctgcatgaccttagtgataaagaaaccaccattagccagcagagtgccgccattttgttctgcgtcgaaggcgatgcaacgttgtggaaaggttctcagcagttacagcttaaaccgggtgaatcagcgtttattgccgccaacgaatcaccggtgactgtcaaaggccacggccgtttagcgcgtgtttacaacaagctgtaagagcttactgaaaaaattaacatctcttgctaagctgggagctcgatccgtcgacctgcagatcgttcaaacatttggcaataaagtttcttaagattgaatcctgttgccggtcttgcgatgattatcatataatttctgttgaattacgttaagcatgtaataattaacatgtaatgcatgacgttatttatgagatgggtttttatgattagagtcccgcaattatacatttaatacgcgatagaaaacaaaatatagcgcgcaaactaggataaattatcgcgcgcggtgtcatctatgttactagatccggaccgcctgcaggcccgggggcgcgccctaattagctaacggccaggatcgccgcgtgagcctttagcaactagctagattaattaacgcaatctgttattaagttgtctaagcgtcaatttgtttacaccacaatatatcctgccaccagccagccaacagctccccgaccggcagctcggcacaaaatcaccactcgatacaggcagcccatcagaattaattctcatgtttgacagcttatcatcgactgcacggtgcaccaatgcttctggcgtcaggcagccatcggaagctgtggtatggctgtgcaggtcgtaaatcactgcataattcgtgtcgctcaaggcgcactcccgttctggataatgttttttgcgccgacatcataacggttctggcaaatattctgaaatgagctgttgacaattaatcatccggctcgtataatgtgtggaattgtgagcggataacaatttcacacaggaaacagaccatgagggaagcgttgatcgccgaagtatcgactcaactatcagaggtagttggcgtcatcgagcgccatctcgaaccgacgttgctggccgtacatttgtacggctccgcagtggatggcggcctgaagccacacagtgatattgatttgctggttacggtgaccgtaaggcttgatgaaacaacgcggcgagctttgatcaacgaccttttggaaacttcggcttcccctggagagagcgagattctccgcgctgtagaagtcaccattgttgtgcacgacgacatcattccgtggcgttatccagctaagcgcgaactgcaatttggagaatggcagcgcaatgacattcttgcaggtatcttcgagccagccacgatcgacattgatctggctatcttgctgacaaaagcaagagaacatagcgttgccttggtaggtccagcggcggaggaactctttgatccggttcctgaacaggatctatttgaggcgctaaatgaaaccttaacgctatggaactcgccgcccgactgggctggcgatgagcgaaatgtagtgcttacgttgtcccgcatttggtacagcgcagtaaccggcaaaatcgcgccgaaggatgtcgctgccgactgggcaatggagcgcctgccggcccagtatcagcccgtcatacttgaagctaggcaggcttatcttggacaagaagatcgcttggcctcgcgcgcagatcagttggaagaatttgttcactacgtgaaaggcgagatcaccaaagtagtcggcaaataaagctctagtggatctccgtacccagggatctggctcgcggcggacgcacgacgccggggcgagaccataggcgatctcctaaatcaatagtagctgtaacctcgaagcgtttcacttgtaacaacgattgagaatttttgtcataaaattgaaatacttggttcgcatttttgtcatccgcggtcagccgcaattctgacgaactgcccatttagctggagatgattgtacatccttcacgtgaaaatttctcaagcgctgtgaacaagggttcagattttagattgaaaggtgagccgttgaaacacgttcttcttgtcgatgacgacgtcgctatgcggcatcttattattgaataccttacgatccacgccttcaaagtgaccgcggtagccgacagcacccagttcacaagagtactctcttccgcgacggtcgatgtcgtggttgttgatctagatttaggtcgtgaagatgggctcgagatcgttcgtaatctggcggcaaagtctgatattccaatcataattatcagtggcgaccgccttgaggagacggataaagttgttgcactcgagctaggagcaagtgattttatcgctaagccgttcagtatcagagagtttctagcacgcattcgggttgccttgcgcgtgcgccccaacgttgtccgctccaaagaccgacggtctttttgttttactgactggacacttaatctcaggcaacgtcgcttgatgtccgaagctggcggtgaggtgaaacttacggcaggtgagttcaatcttctcctcgcgtttttagagaaaccccgcgacgttctatcgcgcgagcaacttctcattgccagtcgagtacgcgacgaggaggtttatgacaggagtatagatgttctcattttgaggctgcgccgcaaacttgaggcagatccgtcaagccctcaactgataaaaacagcaagaggtgccggttatttctttgacgcggacgtgcaggtttcgcacggggggacgatggcagcctgagccaattcccagatccccgaggaatcggcgtgagcggtcgcaaaccatccggcccggtacaaatcggcgcggcgctgggtgatgacctggtggagaagttgaaggccgcgcaggccgcccagcggcaacgcatcgaggcagaagcacgccccggtgaatcgtggcaagcggccgctgatcgaatccgcaaagaatcccggcaaccgccggcagccggtgcgccgtcgattaggaagccgcccaagggcgacgagcaaccagattttttcgttccgatgctctatgacgtgggcacccgcgatagtcgcagcatcatggacgtggccgttttccgtctgtcgaagcgtgaccgacgagctggcgaggtgatccgctacgagcttccagacgggcacgtagaggtttccgcagggccggccggcatggccagtgtgtgggattacgacctggtactgatggcggtttcccatctaaccgaatccatgaaccgataccgggaagggaagggagacaagcccggccgcgtgttccgtccacacgttgcggacgtactcaagttctgccggcgagccgatggcggaaagcagaaagacgacctggtagaaacctgcattcggttaaacaccacgcacgttgccatgcagcgtacgaagaaggccaagaacggccgcctggtgacggtatccgagggtgaagccttgattagccgctacaagatcgtaaagagcgaaaccgggcggccggagtacatcgagatcgagctggctgattggatgtaccgcgagatcacagaaggcaagaacccggacgtgctgacggttcaccccgattactttttgatcgatcccggcatcggccgttttctctaccgcctggcacgccgcgccgcaggcaaggcagaagccagatggttgttcaagacgatctacgaacgcagtggcagcgccggagagttcaagaagttctgtttcaccgtgcgcaagctgatcgggtcaaatgacctgccggagtacgatttgaaggaggaggcggggcaggctggcccgatcctagtcatgcgctaccgcaacctgatcgagggcgaagcatccgccggttcctaatgtacggagcagatgctagggcaaattgccctagcaggggaaaaaggtcgaaaaggtctctttcctgtggatagcacgtacattgggaacccaaagccgtacattgggaaccggaacccgtacattgggaacccaaagccgtacattgggaaccggtcacacatgtaagtgactgatataaaagagaaaaaaggcgatttttccgcctaaaactctttaaaacttattaaaactcttaaaacccgcctggcctgtgcataactgtctggccagcgcacagccgaagagctgcaaaaagcgcctacccttcggtcgctgcgctccctacgccccgccgcttcgcgtcggcctatcgcggccgctggccgctcaaaaatggctggcctacggccaggcaatctaccagggcgcggacaagccgcgccgtcgccactcgaccgccggcgctgaggtctgcctcgtgaagaaggtgttgctgactcataccaggcctgaatcgccccatcatccagccagaaagtgagggagccacggttgatgagagctttgttgtaggtggaccagttggtgattttgaacttttgctttgccacggaacggtctgcgttgtcgggaagatgcgtgatctgatccttcaactcagcaaaagttcgatttattcaacaaagccgccgtcccgtcaagtcagcgtaatgctctgccagtgttacaaccaattaaccaattctgattagaaaaactcatcgagcatcaaatgaaactgcaatttattcatatcaggattatcaataccatatttttgaaaaagccgtttctgtaatgaaggagaaaactcaccgaggcagttccataggatggcaagatcctggtatcggtctgcgattccgactcgtccaacatcaatacaacctattaatttcccctcgtcaaaaataaggttatcaagtgagaaatcaccatgagtgacgactgaatccggtgagaatggcaaaagctctgcattaatgaatcggccaacgcgcggggagaggcggtttgcgtattgggcgctcttccgcttcctcgctcactgactcgctgcgctcggtcgttcggctgcggcgagcggtatcagctcactcaaaggcggtaatacggttatccacagaatcaggggataacgcaggaaagaacatgtgagcaaaaggccagcaaaaggccaggaaccgtaaaaaggccgcgttgctggcgtttttccataggctccgcccccctgacgagcatcacaaaaatcgacgctcaagtcagaggtggcgaaacccgacaggactataaagataccaggcgtttccccctggaagctccctcgtgcgctctcctgttccgaccctgccgcttaccggatacctgtccgcctttctcccttcgggaagcgtggcgctttctcatagctcacgctgtaggtatctcagttcggtgtaggtcgttcgctccaagctgggctgtgtgcacgaaccccccgttcagcccgaccgctgcgccttatccggtaactatcgtcttgagtccaacccggtaagacacgacttatcgccactggcagcagccactggtaacaggattagcagagcgaggtatgtaggcggtgctacagagttcttgaagtggtggcctaactacggctacactagaagaacagtatttggtatctgcgctctgctgaagccagttaccttcggaaaaagagttggtagctcttgatccggcaaacaaaccaccgctggtagcggtggtttttttgtttgcaagcagcagattacgcgcagaaaaaaaggatctcaagaagatcctttgatcttttctacggggtctgacgctcagtggaacgaaaactcacgttaagggattttggtcatgagattatcaaaaaggatcttcacctagatccttttgatccggaatta

SEQ ID NO: 74 - protein, 1342 aa, synthetic construct
MPKKKRKVGGGGSGGGGSGGGGSGGGGSGGGGSGGGGSMLFQDFTHLYPLSKTVRFELKPIGRTLEHIHAKNFLSQDETMADMYQKVKVILDDYHRDFIADMMGEVKLTKLAEFYDVYLKFRKNPKDDGLQKQLKDLQAVLRKESVKPIGSGGKYKTGYDRLFGAKLFKDGKELGDLAKFVIAQEGESSPKLAHLAHFEKFSTYFTGFHDNRKNMYSDEDKHTAIAYRLIHENLPRFIDNLQILTTIKQKHSALYDQIINELTASGLDVSLASHLDGYHKLLTQEGITAYNRIIGEVNGYTNKHNQICHKSERIAKLRPLHKQILSDGMGVSFLPSKFADDSEMCQAVNEFYRHYTDVFAKVQSLFDGFDDHQKDGIYVEHKNLNELSKQAFGDFALLGRVLDGYYVDVVNPEFNERFAKAKTDNAKAKLTKEKDKFIKGVHSLASLEQAIEHHTARHDDESVQAGKLGQYFKHGLAGVDNPIQKIHNNHSTIKGFLERERPAGERALPKIKSGKNPEMTQLRQLKELLDNALNVAHFAKLLTTKTTLDNQDGNFYGEFGVLYDELAKIPTLYNKVRDYLSQKPFSTEKYKLNFGNPTLLNGWDLNKEKDNFGVILQKDGCYYLALLDKAHKKVFDNAPNTGKNVYQKMVYKLLPGPNKMLPKVFFAKSNLDYYNPSAELLDKYAKGTHKKGDNFNLKDCHALIDFFKAGINKHPEWQHFGFKFSPTSSYRDLSDFYREVEPQGYQVKFVDINADYIDELVEQGKLYLFQIYNKDFSPKAHGKPNLHTLYFKALFSEDNLADPIYKLNGEAQIFYRKASLDMNETTIHRAGEVLENKNPDNPKKRQFVYDIIKDKRYTQDKFMLHVPITMNFGVQGMTIKEFNKKVNQSIQQYDEVNVIGIDRGERHLLYLTVINSKGEILEQRSLNDITTASANGTQVTTPYHKILDKREIERLNARVGWGEIETIKELKSGYLSHVVHQINQLMLKYNAIVVLEDLNFGFKRGRFKVEKQIYQNFENALIKKLNHLVLKDKADDEIGSYKNALQLTNNFTDLKSIGKQTGFLFYVPAWNTSKIDPETGFVDLLKPRYENIAQSQAFFGKFDKICYNTDKGYFEFHIDYAKFTDKAKNSRQKWAICSHGDKRYVYDKTANQNKGAAKGINVNDELKSLFARYHINDKQPNLVMDICQNNDKEFHKSLMCLLKTLLQMRNSITGRTDVDFILSPVANDEGVFFNSALADDTQPQNADANGAYHIALKGLWLLNELKNSDDLNKVKLAIDNQTWLNFAQNRGGGGSGGGGSGGGGSGGGGSGGGGSGGGGSPKKKRKVSGGSSGGSPKKKRKV

SEQ ID NO: 75 - protein, 1341 aa, synthetic construct
MPKKKRKVGGGGSGGGGSGGGGSGGGGSGGGGSGGGGSMLFQDFTHLYPLSKTVRFELKPIGRTLEHIHAKNFLSQDETMADMYQKVKVILDDYHRDFIADMMGEVKLTKLAEFYDVYLKFRKNPKDDGLQKQLKDLQAVLRKESVKPIGSGGKYKTGYDRLFGAKLFKDGKELGDLAKFVIAQEGESSPKLAHLAHFEKFSTYFTGFHDNRKNMYSDEDKHTAIAYRLIHENLPRFIDNLQILTTIKQKHSALYDQIINELTASGLDVSLASHLDGYHKLLTQEGITAYNRIIGEVNGYTNKHNQICHKSERIAKLRPLHKQILSDGMGVSFLPSKFADDSEMCQAVNEFYRHYTDVFAKVQSLFDGFDDHQKDGIYVEHKNLNELSKQAFGDFALLGRVLDGYYVDVVNPEFNERFAKAKTDNAKAKLTKEKDKFIKGVHSLASLEQAIEHHTARHDDESVQAGKLGQYFKHGLAGVDNPIQKIHNNHSTIKGFLERERPAGERALPKIKSGKNPEMTQLRQLKELLDNALNVAHFAKLLTTKTTLDNQDGNFYGEFGVLYDELAKIPTLYNKVRDYLSQKPFSTEKYKLNFGNPTLLNGWDLNKEKDNFGVILQKDGCYYLALLDKAHKKVFDNAPNTGKNVYQKMVYKLLPGPNKMLPKVFFAKSNLDYYNPSAELLDKYAKGTHKKGDNFNLKDCHALIDFFKAGINKHPEWQHFGFKFSPTSSYRDLSDFYREVEPQGYQVKFVDINADYIDELVEQGKLYLFQIYNKDFSPKAHGKPNLHTLYFKALFSEDNLADPIYKLNGEAQIFYRKASLDMNETTIHRAGEVLENKNPDNPKKRQFVYDIIKDKRYTQDKFMLHVPITMNFGVQGMTIKEFNKKVNQSIQQYDEVNVIGIDRGERHLLYLTVINSKGEILEQRSLNDITTASANGTQVTTPYHKILDKREIERLNARVGWGEIETIKELKSGYLSHVVHQINQLMLKYNAIVVLEDLNFGFKRGRFKVEKQIYQNFENALIKKLNHLVLKDKADDEIGSYKNALQLTNNFTDLKSIGKQTGFLFYVPAWNTSKIDPETGFVDLLKPRYENIAQSQAFFGKFDKICYNTDKGYFEFHIDYAKFTDKAKNSRQKWAICSHGDKRYVYDKTANQNKGAAKGINVNDELKSLFARYHINDKQPNLVMDICQNNDKEFHKSLMCLLKTLLQMRNSNAATGEDYILSPVANDEGVFFNSALADDTQPQNADANGAYHIALKGLWLLNELKNSDDLNKVKLAIDNQTWLNFAQNRGGGGSGGGGSGGGGSGGGGSGGGGSGGGGSPKKKRKVSGGSSGGSPKKKRKV

SEQ ID NO: 76 - protein, 1341 aa, synthetic construct
MPKKKRKVGGGGSGGGGSGGGGSGGGGSGGGGSGGGGSMLFQDFTHLYPLSKTVRFELKPIGRTLEHIHAKNFLSQDETMADMYQKVKVILDDYHRDFIADMMGEVKLTKLAEFYDVYLKFRKNPKDDGLQKQLKDLQAVLRKESVKPIGSGGKYKTGYDRLFGAKLFKDGKELGDLAKFVIAQEGESSPKLAHLAHFEKFSTYFTGFHDNRKNMYSDEDKHTAIAYRLIHENLPRFIDNLQILTTIKQKHSALYDQIINELTASGLDVSLASHLDGYHKLLTQEGITAYNRIIGEVNGYTNKHNQICHKSERIAKLRPLHKQILSDGMGVSFLPSKFADDSEMCQAVNEFYRHYTDVFAKVQSLFDGFDDHQKDGIYVEHKNLNELSKQAFGDFALLGRVLDGYYVDVVNPEFNERFAKAKTDNAKAKLTKEKDKFIKGVHSLASLEQAIEHHTARHDDESVQAGKLGQYFKHGLAGVDNPIQKIHNNHSTIKGFLERERPAGERALPKIKSGKNPEMTQLRQLKELLDNALNVAHFAKLLTTKTTLDNQDGNFYGEFGVLYDELAKIPTLYNKVRDYLSQKPFSTEKYKLNFGNPTLLNGWDLNKEKDNFGVILQKDGCYYLALLDKAHKKVFDNAPNTGKNVYQKMVYKLLPGPNKMLPKVFFAKSNLDYYNPSAELLDKYAKGTHKKGDNFNLKDCHALIDFFKAGINKHPEWQHFGFKFSPTSSYRDLSDFYREVEPQGYQVKFVDINADYIDELVEQGKLYLFQIYNKDFSPKAHGKPNLHTLYFKALFSEDNLADPIYKLNGEAQIFYRKASLDMNETTIHRAGEVLENKNPDNPKKRQFVYDIIKDKRYTQDKFMLHVPITMNFGVQGMTIKEFNKKVNQSIQQYDEVNVIGIDRGERHLLYLTVINSKGEILEQRSLNDITTASANGTQVTTPYHKILDKREIERLNARVGWGEIETIKELKSGYLSHVVHQINQLMLKYNAIVVLEDLNFGFKRGRFKVEKQIYQNFENALIKKLNHLVLKDKADDEIGSYKNALQLTNNFTDLKSIGKQTGFLFYVPAWNTSKIDPETGFVDLLKPRYENIAQSQAFFGKFDKICYNTDKGYFEFHIDYAKFTDKAKNSRQKWAICSHGDKRYVYDKTANQNKGAAKGINVNDELKSLFARYHINDKQPNLVMDICQNNDKEFHKSLMCLLKTLLALRNSNASSDEDFILSPVANDEGVFFNSALADDTQPQNADANGAYHIALKGLWLLNELKNSDDLNKVKLAIDNQTWLNFAQNRGGGGSGGGGSGGGGSGGGGSGGGGSGGGGSPKKKRKVSGGSSGGSPKKKRKV

SEQ ID NO: 77 - protein, 1346 aa, synthetic construct
MPKKKRKVGGGGSGGGGSGGGGSGGGGSGGGGSGGGGSMLFQDFTHLYPLSKTVRFELKPIGRTLEHIHAKNFLSQDETMADMYQKVKVILDDYHRDFIADMMGEVKLTKLAEFYDVYLKFRKNPKDDGLQKQLKDLQAVLRKESVKPIGSGGKYKTGYDRLFGAKLFKDGKELGDLAKFVIAQEGESSPKLAHLAHFEKFSTYFTGFHDNRKNMYSDEDKHTAIAYRLIHENLPRFIDNLQILTTIKQKHSALYDQIINELTASGLDVSLASHLDGYHKLLTQEGITAYNRIIGEVNGYTNKHNQICHKSERIAKLRPLHKQILSDGMGVSFLPSKFADDSEMCQAVNEFYRHYTDVFAKVQSLFDGFDDHQKDGIYVEHKNLNELSKQAFGDFALLGRVLDGYYVDVVNPEFNERFAKAKTDNAKAKLTKEKDKFIKGVHSLASLEQAIEHHTARHDDESVQAGKLGQYFKHGLAGVDNPIQKIHNNHSTIKGFLERERPAGERALPKIKSGKNPEMTQLRQLKELLDNALNVAHFAKLLTTKTTLDNQDGNFYGEFGVLYDELAKIPTLYNKVRDYLSQKPFSTEKYKLNFGNPTLLNGWDLNKEKDNFGVILQKDGCYYLALLDKAHKKVFDNAPNTGKNVYQKMVYKLLPGPNKMLPKVFFAKSNLDYYNPSAELLDKYAKGTHKKGDNFNLKDCHALIDFFKAGINKHPEWQHFGFKFSPTSSYRDLSDFYREVEPQGYQVKFVDINADYIDELVEQGKLYLFQIYNKDFSPKAHGKPNLHTLYFKALFSEDNLADPIYKLNGEAQIFYRKASLDMNETTIHRAGEVLENKNPDNPKKRQFVYDIIKDKRYTQDKFMLHVPITMNFGVQGMTIKEFNKKVNQSIQQYDEVNVIGIDRGERHLLYLTVINSKGEILEQRSLNDITTASANGTQVTTPYHKILDKREIERLNARVGWGEIETIKELKSGYLSHVVHQINQLMLKYNAIVVLEDLNFGFKRGRFKVEKQIYQNFENALIKKLNHLVLKDKADDEIGSYKNALQLTNNFTDLKSIGKQTGFLFYVPAWLTSKIDPSTGFVNLLKTKYTSIADSKKFISSFDRIMYVPEEDLFEFALDYKNFSRTDADYIKKWKLYSYGNRIRIFRNPKKNNVFDWEEVCLTSAYKELFNKYGINYQQGDIRALLCEQSDKAFYSSFMALMSLMLQMRNSITGRTDVDFLISPVKNSDGIFYDSRNYEAQENAILPKNADANGAYHIALKGLWLLNELKNSDDLNKVKLAIDNQTWLNFAQNRGGGGSGGGGSGGGGSGGGGSGGGGSGGGGSPKKKRKVSGGSSGGSPKKKRKV

SEQ ID NO: 78 - protein, 1360 aa, synthetic construct
MPKKKRKVGGGGSGGGGSGGGGSGGGGSGGGGSGGGGSMLFQDFTHLYPLSKTVRFELKPIGRTLEHIHAKNFLSQDETMADMYQKVKVILDDYHRDFIADMMGEVKLTKLAEFYDVYLKFRKNPKDDGLQKQLKDLQAVLRKESVKPIGSGGKYKTGYDRLFGAKLFKDGKELGDLAKFVIAQEGESSPKLAHLAHFEKFSTYFTGFHDNRKNMYSDEDKHTAIAYRLIHENLPRFIDNLQILTTIKQKHSALYDQIINELTASGLDVSLASHLDGYHKLLTQEGITAYNRIIGEVNGYTNKHNQICHKSERIAKLRPLHKQILSDGMGVSFLPSKFADDSEMCQAVNEFYRHYTDVFAKVQSLFDGFDDHQKDGIYVEHKNLNELSKQAFGDFALLGRVLDGYYVDVVNPEFNERFAKAKTDNAKAKLTKEKDKFIKGVHSLASLEQAIEHHTARHDDESVQAGKLGQYFKHGLAGVDNPIQKIHNNHSTIKGFLERERPAGERALPKIKSGKNPEMTQLRQLKELLDNALNVAHFAKLLTTKTTLDNQDGNFYGEFGVLYDELAKIPTLYNKVRDYLSQKPFSTEKYKLNFGNPTLLNGWDLNKEKDNFGVILQKDGCYYLALLDKAHKKVFDNAPNTGKNVYQKMVYKLLPGPNKMLPKVFFAKSNLDYYNPSAELLDKYAKGTHKKGDNFNLKDCHALIDFFKAGINKHPEWQHFGFKFSPTSSYRDLSDFYREVEPQGYQVKFVDINADYIDELVEQGKLYLFQIYNKDFSPKAHGKPNLHTLYFKALFSEDNLADPIYKLNGEAQIFYRKASLDMNETTIHRAGEVLENKNPDNPKKRQFVYDIIKDKRYTQDKFMLHVPITMNFGVQGMTIKEFNKKVNQSIQQYDEVNVIGIDRGERHLLYLTVINSKGEILEQRSLNDITTASANGTQVTTPYHKILDKREIERLNARVGWGEIETIKELKSGYLSHVVHQINQLMLKYNAIVVLEDLNFGFKRGRFKVEKQIYQNFENALIKKLNHLVLKDKADDEIGSYKNALQLTNNFTDLKSIGKQTGFLFYVPAPYTSKIDPLTGFVDPFVWKTIKNHESRKHFLEGFDFLHYDVKTGDFILHFKMNRNLSFQRGLPGFMPAWDIVFEKNETQFDAKGTPFIAGKRIVPVIENHRFTGRYRDLYPANELIALLEEKGIVFRDGSNILPKLLENDDSHAIDTMVALIRSVLQMRNSNAATGEDYINSPVRDLNGVCFDSRFQNPEWPMDADANGAYHIALKGLWLLNELKNSDDLNKVKLAIDNQTWLNFAQNRGGGGSGGGGSGGGGSGGGGSGGGGSGGGGSPKKKRKVSGGSSGGSPKKKRKV

SEQ ID NO: 79 - DNA, 17531 bp, synthetic construct
  source 1..17531: mol_type = other DNA
attcctgtggttggcatgcacatacaaatggacgaacggataaaccttttcacgcccttttaaatatccgattattctaataaacgctcttttctcttaggtttacccgccaatatatcctgtcaaacactgatagtttaaactggcactagcctaacggtgttgactaactaggccgcttccctaattagctaacccgggggcgcgccgggaccggaattcattatgtggtctaggtaggttctatatataagaaaacttgaaatgttctaaaaaaaaattcaagcccatgcatgattgaagcaaacggtatagcaacggtgttaacctgatctagtgatctcttgcaatccttaacggccacctaccgcaggtagcaaacggcgtccccctcctcgatatctccgcggcgacctctggctttttccgcggaattgcgcggtggggacggattccacgagaccgcgacgcaaccgcctctcgccgctgggccccacaccgctcggtgccgtagcctcacgggactctttctccctcctcccccgttataaattggcttcatcccctccttgcctcatccatccaaatcccagtccccaatcccatcccttcgtaggagaaattcatcgaagctaagcgaatcctcgcgatcctctcaaggtactgcgagttttcgatccccctctcgacccctcgtatgtttgtgtttgtcgtagcgtttgattaggtatgctttccctgtttgtgttcgtcgtagcgtttgattaggtatgctttccctgttcgtgttcatcgtagtgtttgattaggtcgtgtgaggcgatggcctgctcgcgtccttcgatctgtagtcgatttgcgggtcgtggtgtagatctgcgggctgtgatgaagttatttggtgtgatctgctcgcctgattctgcgggttggctcgagtagatatgatggttggaccggttggttcgtttaccgcgctagggttgggctgggatgatgttgcatgcgccgttgcgcgtgatcccgcagcaggacttgcgtttgattgccagatctcgttacgattatgtgatttggtttggactttttagatctgtagcttctgcttatgtgccagatgcgcctactgctcatatgcctgatgataatcataaatggctgtggaactaactagttgattgcggagtcatgtatcagctacaggtgtagggactagctacaggtgtagggacttgcgtctaattgtttggtcctttactcatgttgcaattatgcaatttagtttagattgtttgttccactcatctaggctgtaaaagggacactgcttagattgctgtttaatctttttagtagattatattatattggtaacttattacccctattacatgccatacgtgacttctgctcatgcctgatgataatcatagatcactgtggaattaattagttgattgttgaatcatgtttcatgtacataccacggcacaattgcttagttccttaacaaatgcaaattttactgatccatgtatgatttgcgtggttctctaatgtgaaatactatagctacttgttagtaagaatcaggttcgtatgcttaatgctgtatgtgccttctgctcatgcctgatgataatcatatatcactggaattaattagttgatcgtttaatcatatatcaagtacataccatgccacaatttttagtcacttaacccatgcagattgaactggtccctgcatgttttgctaaattgttctattctgattagaccatatatcatgtatttttttttggtaatggttctcttattttaaatgctatatagttctggtacttgttagaaagatctgcttcatagtttagttgcctatccctcgaattaggatgctgagcagctgatcctatagctttgtttcatgtatcaattcttttgtgttcaacagtcagtttttgttagattcattgtaacttatggtcgcttactcttctggtcctcaatgcttgcagggatcccctaaatagaccatgccgaagaagaagcgcaaggtcgggggcgggggctcaggcgggggcgggagcggcggcgggggctctgggggcggcggcagcggcgggggcggcagcgggggcggcgggtcgatgctgttccaggatttcactcatctgtaccctctctcaaagactgttcggttcgagctcaagcctattgggcggactctggagcacatccacgcgaagaacttcctcagccaggacgaaaccatggccgacatgtaccagaaggtcaaggtcatcctcgacgactaccacagggacttcatcgcggacatgatgggcgaggtgaagctgacgaagctcgccgagttctacgacgtctacctcaagttccgcaagaacccgaaggacgacggcctccagaagcagctcaaggacctgcaggccgtcctgaggaaggagtccgtcaagcccatcggcagcggcggcaagtacaagaccggctacgacaggctgttcggcgccaagctgttcaaggacggcaaggagctcggcgacctggcgaagttcgtgatcgcgcaggagggcgagagctcccccaagctggcccacctggcccacttcgagaagttcagcacgtacttcaccggcttccacgacaacaggaagaacatgtacagcgacgaggacaagcacacggccatcgcctaccgcctcatccacgagaacctgccccgcttcatcgacaacctgcagatcctgacgaccatcaagcagaagcactccgccctgtacgaccagatcatcaacgagctcaccgcgagcggcctcgacgtgtccctcgccagccacctcgacggctaccacaagctcctgacccaggagggcatcaccgcctacaaccgcatcatcggcgaggtgaacggctacaccaacaagcacaaccagatctgccacaagtccgagaggatcgccaagctcaggcccctgcacaagcagatcctcagcgacggcatgggcgtgagcttcctcccgtccaagttcgccgacgactccgagatgtgccaggccgtgaacgagttctacaggcactacaccgacgtgttcgccaaggtgcagtccctgttcgacggcttcgacgaccaccagaaggacggcatctacgtggagcacaagaacctgaacgagctgtccaagcaggccttcggcgactgggccctcctgggccgcgtgctggacggctactacgtggacgtcgtgaacccggagttcaacgagcgcttcgcgaaggcgaagacggacaacgcgaaggccaagctcaccaaggagaaggacaagttcatcaagggcgtccacagcctcgcgtccctggagcaggcgatcgagcaccacaccgcgcgccacgacgacgagtccgtgcaggccggcaagctcggccagtacttcaagcacggcctggccggcgtcgacaacccgatccagaagatccacaacaaccactccaccatcaagggcttcctggagagggagcgcccggcgggcgagcgcgcgctccccaagatcaagtccggcaagaaccccgagatgacgcagctcaggcagctgaaggagctgctcgacaacgcgctcaacgtggcgcacttcgccaagctgctcacgaccaagaccacgctggacaaccaggacggcaacttctacggcgagttcggcgtcctgtacgacgagctggcgaagatcccgaccctgtacaacaaggtccgcgactacctgagccagaagcccttctccaccgagaagtacaagctcaacttcggcaacccgaccctcctgaacggctgggacctcaacaaggagaaggacaacttcggcgtgatcctccagaaggacggctgctactacctcgccctgctggacaaggcgcacaagaaggtcttcgacaacgccccgaacaccggcaagaacgtgtaccagaagatggtgtacaagctgctccccggccccaacaagatgctgccgaaggtgttcttcgcgaagtccaacctcgactactacaaccccagcgccgagctcctggacaagtacgccaagggcacgcacaagaagggcgacaacttcaacctcaaggactgccacgcgctgatcgacttcttcaaggcgggcatcaacaagcaccccgagtggcagcacttcggcttcaagttcagcccgacctccagctacagggacctcagcgacttctaccgcgaggtggagccccagggctaccaggtgaagttcgtcgacatcaacgccgactacatcgacgagctcgtcgagcagggcaagctctacctgttccagatctacaacaaggacttctccccgaaggcccacggcaagccgaacctccacacgctctacttcaaggccctcttcagcgaggacaacctggccgacccgatctacaagctcaacggcgaggcgcagatcttctaccgcaaggccagcctggacatgaacgaaacgaccatccacagggccggcgaggtcctggagaacaagaacccggacaacccgaagaagaggcagttcgtctacgacatcatcaaggacaagaggtacacccaggacaagttcatgctccacgtcccgatcaccatgaacttcggcgtccagggcatgaccatcaaggagttcaacaagaaggtcaaccagagcatccagcagtacgacgaggtgaacgtcatcggcatcgaccgcggcgagaggcacctgctctacctgacggtcatcaactccaagggcgagatcctcgagcagcgcagcctgaacgacatcacgaccgcgagcgccaacggcacgcaggtcaccacgccgtaccacaagatcctcgacaagcgcgagatcgagaggctgaacgcgcgcgtcggctggggcgagatcgaaacgatcaaggagctcaagtccggctacctcagccacgtcgtgcaccagatcaaccagctcatgctgaagtacaacgcgatcgtggtcctcgaggacctgaacttcggcttcaagaggggccgcttcaaggtggagaagcagatctaccagaacttcgagaacgccctgatcaagaagctcaaccacctggtcctcaaggacaaggcggacgacgagatcggcagctacaagaacgcgctccagctgaccaacaacttcacggacctcaagtccatcggcaagcagacgggcttcctgttctacgtgccggcgtggaacacctccaagatcgacccggaaaccggcttcgtcgacctgctcaagccgcgctacgagaacatcgcgcagtcccaggcgttcttcggcaagttcgacaagatctgctacaacaccgacaagggctacttcgagttccacatcgactacgcgaagttcaccgacaaggccaagaactccaggcagaagtgggccatctgcagccacggcgacaagcgctacgtgtacgacaagacggcgaaccagaacaagggcgcggccaagggcatcaacgtgaacgacgagctgaagtccctcttcgcgcgctaccacatcaacgacaagcagccgaacctcgtcatggacatctgccagaacaacgacaaggagttccacaagagcctgatgtgcctgctcaagaccctgctcgccctccgctactccaacgcgagctccgacgaggacttcatcctcagccccgtcgcgaacgacgagggcgtgttcttcaactccgccctcgcggacgacacgcagccgcagaacgccgacgcgaacggcgcctaccacatcgccctcaagggcctgtggctgctcaacgagctcaagaactccgacgacctgaacaaggtgaagctcgccattgacaaccagacgtggctgaatttcgctcagaatagggggggcgggggctcaggcgggggcgggagcggcggcgggggctctgggggcggcggcagcggcgggggcggcagcgggggcggcgggtcgccgaagaagaagcgcaaggtgtccggcggcagctccggcggcagcccgaagaagaagcgcaaagtgtgagggacccgatcgttcaaacatttggcaataaagtttcttaagattgaatcctgttgccggtcttgcgatgattatcatataatttctgttgaattacgttaagcatgtaataattaacatgtaatgcatgacgttatttatgagatgggtttttatgattagagtcccgcaattatacatttaatacgcgatagaaaacaaaatatagcgcgcaaactaggataaattatcgcgcgcggtgtcatctatgttactagatcggtaccgaattcattatgtggtctaggtaggttctatatataagaaaacttgaaatgttctaaaaaaaaattcaagcccatgcatgattgaagcaaacggtatagcaacggtgttaacctgatctagtgatctcttgcaatccttaacggccacctaccgcaggtagcaaacggcgtccccctcctcgatatctccgcggcgacctctggctttttccgcggaattgcgcggtggggacggattccacgagaccgcgacgcaaccgcctctcgccgctgggccccacaccgctcggtgccgtagcctcacgggactctttctccctcctcccccgttataaattggcttcatcccctccttgcctcatccatccaaatcccagtccccaatcccatcccttcgtaggagaaattcatcgaagctaagcgaatcctcgcgatcctctcaaggtactgcgagttttcgatccccctctcgacccctcgtatgtttgtgtttgtcgtagcgtttgattaggtatgctttccctgtttgtgttcgtcgtagcgtttgattaggtatgctttccctgttcgtgttcatcgtagtgtttgattaggtcgtgtgaggcgatggcctgctcgcgtccttcgatctgtagtcgatttgcgggtcgtggtgtagatctgcgggctgtgatgaagttatttggtgtgatctgctcgcctgattctgcgggttggctcgagtagatatgatggttggaccggttggttcgtttaccgcgctagggttgggctgggatgatgttgcatgcgccgttgcgcgtgatcccgcagcaggacttgcgtttgattgccagatctcgttacgattatgtgatttggtttggactttttagatctgtagcttctgcttatgtgccagatgcgcctactgctcatatgcctgatgataatcataaatggctgtggaactaactagttgattgcggagtcatgtatcagctacaggtgtagggactagctacaggtgtagggacttgcgtctaattgtttggtcctttactcatgttgcaattatgcaatttagtttagattgtttgttccactcatctaggctgtaaaagggacactgcttagattgctgtttaatctttttagtagattatattatattggtaacttattacccctattacatgccatacgtgacttctgctcatgcctgatgataatcatagatcactgtggaattaattagttgattgttgaatcatgtttcatgtacataccacggcacaattgcttagttccttaacaaatgcaaattttactgatccatgtatgatttgcgtggttctctaatgtgaaatactatagctacttgttagtaagaatcaggttcgtatgcttaatgctgtatgtgccttctgctcatgcctgatgataatcatatatcactggaattaattagttgatcgtttaatcatatatcaagtacataccatgccacaatttttagtcacttaacccatgcagattgaactggtccctgcatgttttgctaaattgttctattctgattagaccatatatcatgtatttttttttggtaatggttctcttattttaaatgctatatagttctggtacttgttagaaagatctgcttcatagtttagttgcctatccctcgaattaggatgctgagcagctgatcctatagctttgtttcatgtatcaattcttttgtgttcaacagtcagtttttgttagattcattgtaacttatggtcgcttactcttctggtcctcaatgcttgcagaagcttgaaattctgatgagtccgtgaggacgaaacgagtaagctcgtcaatttctactgtttgtagatgggaaagaccgaggagaagatctaatttctactgtttgtagatgcaccaaggaaggggaggagatcaatttctactgtttgtagatgtcacagatcacaaacttcaaatgaatttctactgtttgtagatacgcccagaaagcatacgcagtcggccggcatggtcccagcctcctcgctggcgccggctgggcaacatgcttcggcatggcgaatgggacgatcgttcaaacatttggcaataaagtttcttaagattgaatcctgttgccggtcttgcgatgattatcatataatttctgttgaattacgttaagcatgtaataattaacatgtaatgcatgacgttatttatgagatgggtttttatgattagagtcccgcaattatacatttaatacgcgatagaaaacaaaatatagcgcgcaaactaggataaattatcgcgcgcggtgtcatctatgttactagatccctaggctgcagtgcagcgtgacccggtcgtgcccctctctagagataatgagcattgcatgtctaagttataaaaaattaccacatattttttttgtcacacttgtttgaagtgcagtttatctatctttatacatatatttaaactttactctacgaataatataatctatagtactacaataatatcagtgttttagagaatcatataaatgaacagttagacatggtctaaaggacaattgagtattttgacaacaggactctacagttttatctttttagtgtgcatgtgttctcctttttttttgcaaatagcttcacctatataatacttcatccattttattagtacatccatttagggtttagggttaatggtttttatagactaatttttttagtacatctattttattctattttagcctctaaattaagaaaactaaaactctattttagtttttttatttaataatttagatataaaatagaataaaataaagtgactaaaaattaaacaaataccctttaagaaattaaaaaaactaaggaaacatttttcttgtttcgagtagataatgccagcctgttaaacgccgtcgacgagtctaacggacaccaaccagcgaaccagcagcgtcgcgtcgggccaagcgaagcagacggcacggcatctctgtcgctgcctctggacccctctcgagagttccgctccaccgttggacttgctccgctgtcggcatccagaaattgcgtggcggagcggcagacgtgagccggcacggcaggcggcctcctcctcctctcacggcaccggcagctacgggggattcctttcccaccgctccttcgctttcccttcctcgcccgccgtaataaatagacaccccctccacaccctctttccccaacctcgtgttgttcggagcgcacacacacacaaccagatctcccccaaatccacccgtcggcacctccgcttcaaggtacgccgctcgtcctccccccccccccctctctaccttctctagatcggcgttccggtccatggttagggcccggtagttctacttctgttcatgtttgtgttagatccgtgtttgtgttagatccgtgctgctagcgttcgtacacggatgcgacctgtacgtcagacacgttctgattgctaacttgccagtgtttctctttggggaatcctgggatggctctagccgttccgcagacgggatcgatttcatgattttttttgtttcgttgcatagggtttggtttgcccttttcctttatttcaatatatgccgtgcacttgtttgtcgggtcatcttttcatgcttttttttgtcttggttgtgatgatgtggtctggttgggcggtcgttctagatcggagtagaattctgtttcaaactacctggtggatttattaattttggatctgtatgtgtgtgccatacatattcatagttacgaattgaagatgatggatggaaatatcgatctaggataggtatacatgttgatgcgggttttactgatgcatatacagagatgctttttgttcgcttggttgtgatgatgtggtgtggttgggcggtcgttcattcgttctagatcggagtagaatactgtttcaaactacctggtgtatttattaattttggaactgtatgtgtgtgtcatacatcttcatagttacgagtttaagatggatggaaatatcgatctaggataggtatacatgttgatgtgggttttactgatgcatatacatgatggcatatgcagcatctattcatatgctctaaccttgagtacctatctattataataaacaagtatgttttataattattttgatcttgatatacttggatgatggcatatgcagcagctatatgtggatttttttagccctgccttcatacgctatttatttgcttggtactgtttcttttgtcgatgctcaccctgttgtttggtgttacttctgcagggatcaccgatcatgcaaaaactcattaactcagtgcaaaactatgcctggggcagcaaaacggcgttgactgaactttatggtatggaaaatccgtccagccagccgatggccgagctgtggatgggcgcacatccgaaaagcagttcacgagtgcagaatgccgccggagatatcgtttcactgcgtgatgtgattgagagtgataaatcgactctgctcggagaggccgttgccaaacgctttggcgaactgcctttcctgttcaaagtattatgcgcagcacagccactctccattcaggttcatccaaacaaacacaattctgaaatcggttttgccaaagaaaatgccgcaggtatcccgatggatgccgccgagcgtaactataaagatcctaaccacaagccggagctggtttttgcgctgacgcctttccttgcgatgaacgcgtttcgtgaattttccgagattgtctccctactccagccggtcgcaggtgcacatccggcgattgctcactttttacaacagcctgatgccgaacgtttaagcgaactgttcgccagcctgttgaatatgcagggtgaagaaaaatcccgcgcgctggcgattttaaaatcggccctcgatagccagcagggtgaaccgtggcaaacgattcgtttaatttctgaattttacccggaagacagcggtctgttctccccgctattgctgaatgtggtgaaattgaaccctggcgaagcgatgttcctgttcgctgaaacaccgcacgcttacctgcaaggcgtggcgctggaagtgatggcaaactccgataacgtgctgcgtgcgggtctgacgcctaaatacattgatattccggaactggttgccaatgtgaaattcgaagccaaaccggctaaccagttgttgacccagccggtgaaacaaggtgcagaactggacttcccgattccagtggatgattttgccttctcgctgcatgaccttagtgataaagaaaccaccattagccagcagagtgccgccattttgttctgcgtcgaaggcgatgcaacgttgtggaaaggttctcagcagttacagcttaaaccgggtgaatcagcgtttattgccgccaacgaatcaccggtgactgtcaaaggccacggccgtttagcgcgtgtttacaacaagctgtaagagcttactgaaaaaattaacatctcttgctaagctgggagctcgatccgtcgacctgcagatcgttcaaacatttggcaataaagtttcttaagattgaatcctgttgccggtcttgcgatgattatcatataatttctgttgaattacgttaagcatgtaataattaacatgtaatgcatgacgttatttatgagatgggtttttatgattagagtcccgcaattatacatttaatacgcgatagaaaacaaaatatagcgcgcaaactaggataaattatcgcgcgcggtgtcatctatgttactagatccggaccgcctgcaggcccgggggcgcgccctaattagctaacggccaggatcgccgcgtgagcctttagcaactagctagattaattaacgcaatctgttattaagttgtctaagcgtcaatttgtttacaccacaatatatcctgccaccagccagccaacagctccccgaccggcagctcggcacaaaatcaccactcgatacaggcagcccatcagaattaattctcatgtttgacagcttatcatcgactgcacggtgcaccaatgcttctggcgtcaggcagccatcggaagctgtggtatggctgtgcaggtcgtaaatcactgcataattcgtgtcgctcaaggcgcactcccgttctggataatgttttttgcgccgacatcataacggttctggcaaatattctgaaatgagctgttgacaattaatcatccggctcgtataatgtgtggaattgtgagcggataacaatttcacacaggaaacagaccatgagggaagcgttgatcgccgaagtatcgactcaactatcagaggtagttggcgtcatcgagcgccatctcgaaccgacgttgctggccgtacatttgtacggctccgcagtggatggcggcctgaagccacacagtgatattgatttgctggttacggtgaccgtaaggcttgatgaaacaacgcggcgagctttgatcaacgaccttttggaaacttcggcttcccctggagagagcgagattctccgcgctgtagaagtcaccattgttgtgcacgacgacatcattccgtggcgttatccagctaagcgcgaactgcaatttggagaatggcagcgcaatgacattcttgcaggtatcttcgagccagccacgatcgacattgatctggctatcttgctgacaaaagcaagagaacatagcgttgccttggtaggtccagcggcggaggaactctttgatccggttcctgaacaggatctatttgaggcgctaaatgaaaccttaacgctatggaactcgccgcccgactgggctggcgatgagcgaaatgtagtgcttacgttgtcccgcatttggtacagcgcagtaaccggcaaaatcgcgccgaaggatgtcgctgccgactgggcaatggagcgcctgccggcccagtatcagcccgtcatacttgaagctaggcaggcttatcttggacaagaagatcgcttggcctcgcgcgcagatcagttggaagaatttgttcactacgtgaaaggcgagatcaccaaagtagtcggcaaataaagctctagtggatctccgtacccagggatctggctcgcggcggacgcacgacgccggggcgagaccataggcgatctcctaaatcaatagtagctgtaacctcgaagcgtttcacttgtaacaacgattgagaatttttgtcataaaattgaaatacttggttcgcatttttgtcatccgcggtcagccgcaattctgacgaactgcccatttagctggagatgattgtacatccttcacgtgaaaatttctcaagcgctgtgaacaagggttcagattttagattgaaaggtgagccgttgaaacacgttcttcttgtcgatgacgacgtcgctatgcggcatcttattattgaataccttacgatccacgccttcaaagtgaccgcggtagccgacagcacccagttcacaagagtactctcttccgcgacggtcgatgtcgtggttgttgatctagatttaggtcgtgaagatgggctcgagatcgttcgtaatctggcggcaaagtctgatattccaatcataattatcagtggcgaccgccttgaggagacggataaagttgttgcactcgagctaggagcaagtgattttatcgctaagccgttcagtatcagagagtttctagcacgcattcgggttgccttgcgcgtgcgccccaacgttgtccgctccaaagaccgacggtctttttgttttactgactggacacttaatctcaggcaacgtcgcttgatgtccgaagctggcggtgaggtgaaacttacggcaggtgagttcaatcttctcctcgcgtttttagagaaaccccgcgacgttctatcgcgcgagcaacttctcattgccagtcgagtacgcgacgaggaggtttatgacaggagtatagatgttctcattttgaggctgcgccgcaaacttgaggcagatccgtcaagccctcaactgataaaaacagcaagaggtgccggttatttctttgacgcggacgtgcaggtttcgcacggggggacgatggcagcctgagccaattcccagatccccgaggaatcggcgtgagcggtcgcaaaccatccggcccggtacaaatcggcgcggcgctgggtgatgacctggtggagaagttgaaggccgcgcaggccgcccagcggcaacgcatcgaggcagaagcacgccccggtgaatcgtggcaagcggccgctgatcgaatccgcaaagaatcccggcaaccgccggcagccggtgcgccgtcgattaggaagccgcccaagggcgacgagcaaccagattttttcgttccgatgctctatgacgtgggcacccgcgatagtcgcagcatcatggacgtggccgttttccgtctgtcgaagcgtgaccgacgagctggcgaggtgatccgctacgagcttccagacgggcacgtagaggtttccgcagggccggccggcatggccagtgtgtgggattacgacctggtactgatggcggtttcccatctaaccgaatccatgaaccgataccgggaagggaagggagacaagcccggccgcgtgttccgtccacacgttgcggacgtactcaagttctgccggcgagccgatggcggaaagcagaaagacgacctggtagaaacctgcattcggttaaacaccacgcacgttgccatgcagcgtacgaagaaggccaagaacggccgcctggtgacggtatccgagggtgaagccttgattagccgctacaagatcgtaaagagcgaaaccgggcggccggagtacatcgagatcgagctggctgattggatgtaccgcgagatcacagaaggcaagaacccggacgtgctgacggttcaccccgattactttttgatcgatcccggcatcggccgttttctctaccgcctggcacgccgcgccgcaggcaaggcagaagccagatggttgttcaagacgatctacgaacgcagtggcagcgccggagagttcaagaagttctgtttcaccgtgcgcaagctgatcgggtcaaatgacctgccggagtacgatttgaaggaggaggcggggcaggctggcccgatcctagtcatgcgctaccgcaacctgatcgagggcgaagcatccgccggttcctaatgtacggagcagatgctagggcaaattgccctagcaggggaaaaaggtcgaaaaggtctctttcctgtggatagcacgtacattgggaacccaaagccgtacattgggaaccggaacccgtacattgggaacccaaagccgtacattgggaaccggtcacacatgtaagtgactgatataaaagagaaaaaaggcgatttttccgcctaaaactctttaaaacttattaaaactcttaaaacccgcctggcctgtgcataactgtctggccagcgcacagccgaagagctgcaaaaagcgcctacccttcggtcgctgcgctccctacgccccgccgcttcgcgtcggcctatcgcggccgctggccgctcaaaaatggctggcctacggccaggcaatctaccagggcgcggacaagccgcgccgtcgccactcgaccgccggcgctgaggtctgcctcgtgaagaaggtgttgctgactcataccaggcctgaatcgccccatcatccagccagaaagtgagggagccacggttgatgagagctttgttgtaggtggaccagttggtgattttgaacttttgctttgccacggaacggtctgcgttgtcgggaagatgcgtgatctgatccttcaactcagcaaaagttcgatttattcaacaaagccgccgtcccgtcaagtcagcgtaatgctctgccagtgttacaaccaattaaccaattctgattagaaaaactcatcgagcatcaaatgaaactgcaatttattcatatcaggattatcaataccatatttttgaaaaagccgtttctgtaatgaaggagaaaactcaccgaggcagttccataggatggcaagatcctggtatcggtctgcgattccgactcgtccaacatcaatacaacctattaatttcccctcgtcaaaaataaggttatcaagtgagaaatcaccatgagtgacgactgaatccggtgagaatggcaaaagctctgcattaatgaatcggccaacgcgcggggagaggcggtttgcgtattgggcgctcttccgcttcctcgctcactgactcgctgcgctcggtcgttcggctgcggcgagcggtatcagctcactcaaaggcggtaatacggttatccacagaatcaggggataacgcaggaaagaacatgtgagcaaaaggccagcaaaaggccaggaaccgtaaaaaggccgcgttgctggcgtttttccataggctccgcccccctgacgagcatcacaaaaatcgacgctcaagtcagaggtggcgaaacccgacaggactataaagataccaggcgtttccccctggaagctccctcgtgcgctctcctgttccgaccctgccgcttaccggatacctgtccgcctttctcccttcgggaagcgtggcgctttctcatagctcacgctgtaggtatctcagttcggtgtaggtcgttcgctccaagctgggctgtgtgcacgaaccccccgttcagcccgaccgctgcgccttatccggtaactatcgtcttgagtccaacccggtaagacacgacttatcgccactggcagcagccactggtaacaggattagcagagcgaggtatgtaggcggtgctacagagttcttgaagtggtggcctaactacggctacactagaagaacagtatttggtatctgcgctctgctgaagccagttaccttcggaaaaagagttggtagctcttgatccggcaaacaaaccaccgctggtagcggtggtttttttgtttgcaagcagcagattacgcgcagaaaaaaaggatctcaagaagatcctttgatcttttctacggggtctgacgctcagtggaacgaaaactcacgttaagggattttggtcatgagattatcaaaaaggatcttcacctagatccttttgatccggaatta

SEQ ID NO: 80 - protein, 1341 aa, synthetic construct
MPKKKRKVGGGGSGGGGSGGGGSGGGGSGGGGSGGGGSMLFQDFTHLYPLSKTVRFELKPIGRTLEHIHAKNFLSQDETMADMYQKVKVILDDYHRDFIADMMGEVKLTKLAEFYDVYLKFRKNPKDDGLQKQLKDLQAVLRKESVKPIGSGGKYKTGYDRLFGAKLFKDGKELGDLAKFVIAQEGESSPKLAHLAHFEKFSTYFTGFHDNRKNMYSDEDKHTAIAYRLIHENLPRFIDNLQILTTIKQKHSALYDQIINELTASGLDVSLASHLDGYHKLLTQEGITAYNRIIGEVNGYTNKHNQICHKSERIAKLRPLHKQILSDGMGVSFLPSKFADDSEMCQAVNEFYRHYTDVFAKVQSLFDGFDDHQKDGIYVEHKNLNELSKQAFGDWALLGRVLDGYYVDVVNPEFNERFAKAKTDNAKAKLTKEKDKFIKGVHSLASLEQAIEHHTARHDDESVQAGKLGQYFKHGLAGVDNPIQKIHNNHSTIKGFLERERPAGERALPKIKSGKNPEMTQLRQLKELLDNALNVAHFAKLLTTKTTLDNQDGNFYGEFGVLYDELAKIPTLYNKVRDYLSQKPFSTEKYKLNFGNPTLLNGWDLNKEKDNFGVILQKDGCYYLALLDKAHKKVFDNAPNTGKNVYQKMVYKLLPGPNKMLPKVFFAKSNLDYYNPSAELLDKYAKGTHKKGDNFNLKDCHALIDFFKAGINKHPEWQHFGFKFSPTSSYRDLSDFYREVEPQGYQVKFVDINADYIDELVEQGKLYLFQIYNKDFSPKAHGKPNLHTLYFKALFSEDNLADPIYKLNGEAQIFYRKASLDMNETTIHRAGEVLENKNPDNPKKRQFVYDIIKDKRYTQDKFMLHVPITMNFGVQGMTIKEFNKKVNQSIQQYDEVNVIGIDRGERHLLYLTVINSKGEILEQRSLNDITTASANGTQVTTPYHKILDKREIERLNARVGWGEIETIKELKSGYLSHVVHQINQLMLKYNAIVVLEDLNFGFKRGRFKVEKQIYQNFENALIKKLNHLVLKDKADDEIGSYKNALQLTNNFTDLKSIGKQTGFLFYVPAWNTSKIDPETGFVDLLKPRYENIAQSQAFFGKFDKICYNTDKGYFEFHIDYAKFTDKAKNSRQKWAICSHGDKRYVYDKTANQNKGAAKGINVNDELKSLFARYHINDKQPNLVMDICQNNDKEFHKSLMCLLKTLLALRYSNASSDEDFILSPVANDEGVFFNSALADDTQPQNADANGAYHIALKGLWLLNELKNSDDLNKVKLAIDNQTWLNFAQNRGGGGSGGGGSGGGGSGGGGSGGGGSGGGGSPKKKRKVSGGSSGGSPKKKRKV

SEQ ID NO: 81 - DNA, 17531 bp, synthetic construct
  source 1..17531: mol_type = other DNA
attcctgtggttggcatgcacatacaaatggacgaacggataaaccttttcacgcccttttaaatatccgattattctaataaacgctcttttctcttaggtttacccgccaatatatcctgtcaaacactgatagtttaaactggcactagcctaacggtgttgactaactaggccgcttccctaattagctaacccgggggcgcgccgggaccggaattcattatgtggtctaggtaggttctatatataagaaaacttgaaatgttctaaaaaaaaattcaagcccatgcatgattgaagcaaacggtatagcaacggtgttaacctgatctagtgatctcttgcaatccttaacggccacctaccgcaggtagcaaacggcgtccccctcctcgatatctccgcggcgacctctggctttttccgcggaattgcgcggtggggacggattccacgagaccgcgacgcaaccgcctctcgccgctgggccccacaccgctcggtgccgtagcctcacgggactctttctccctcctcccccgttataaattggcttcatcccctccttgcctcatccatccaaatcccagtccccaatcccatcccttcgtaggagaaattcatcgaagctaagcgaatcctcgcgatcctctcaaggtactgcgagttttcgatccccctctcgacccctcgtatgtttgtgtttgtcgtagcgtttgattaggtatgctttccctgtttgtgttcgtcgtagcgtttgattaggtatgctttccctgttcgtgttcatcgtagtgtttgattaggtcgtgtgaggcgatggcctgctcgcgtccttcgatctgtagtcgatttgcgggtcgtggtgtagatctgcgggctgtgatgaagttatttggtgtgatctgctcgcctgattctgcgggttggctcgagtagatatgatggttggaccggttggttcgtttaccgcgctagggttgggctgggatgatgttgcatgcgccgttgcgcgtgatcccgcagcaggacttgcgtttgattgccagatctcgttacgattatgtgatttggtttggactttttagatctgtagcttctgcttatgtgccagatgcgcctactgctcatatgcctgatgataatcataaatggctgtggaactaactagttgattgcggagtcatgtatcagctacaggtgtagggactagctacaggtgtagggacttgcgtctaattgtttggtcctttactcatgttgcaattatgcaatttagtttagattgtttgttccactcatctaggctgtaaaagggacactgcttagattgctgtttaatctttttagtagattatattatattggtaacttattacccctattacatgccatacgtgacttctgctcatgcctgatgataatcatagatcactgtggaattaattagttgattgttgaatcatgtttcatgtacataccacggcacaattgcttagttccttaacaaatgcaaattttactgatccatgtatgatttgcgtggttctctaatgtgaaatactatagctacttgttagtaagaatcaggttcgtatgcttaatgctgtatgtgccttctgctcatgcctgatgataatcatatatcactggaattaattagttgatcgtttaatcatatatcaagtacataccatgccacaatttttagtcacttaacccatgcagattgaactggtccctgcatgttttgctaaattgttctattctgattagaccatatatcatgtatttttttttggtaatggttctcttattttaaatgctatatagttctggtacttgttagaaagatctgcttcatagtttagttgcctatccctcgaattaggatgctgagcagctgatcctatagctttgtttcatgtatcaattcttttgtgttcaacagtcagtttttgttagattcattgtaacttatggtcgcttactcttctggtcctcaatgcttgcagggatcccctaaatagaccatgccgaagaagaagcgcaaggtcgggggcgggggctcaggcgggggcgggagcggcggcgggggctctgggggcggcggcagcggcgggggcggcagcgggggcggcgggtcgatgctgttccaggatttcactcatctgtaccctctctcaaagactgttcggttcgagctcaagcctattgggcggactctggagcacatccacgcgaagaacttcctcagccaggacgaaaccatggccgacatgtaccagaaggtcaaggtcatcctcgacgactaccacagggacttcatcgcggacatgatgggcgaggtgaagctgacgaagctcgccgagttctacgacgtctacctcaagttccgcaagaacccgaaggacgacggcctccagaagcagctcaaggacctgcaggccgtcctgaggaaggagtccgtcaagcccatcggcagcggcggcaagtacaagaccggctacgacaggctgttcggcgccaagctgttcaaggacggcaaggagctcggcgacctggcgaagttcgtgatcgcgcaggagggcgagagctcccccaagctggcccacctggcccacttcgagaagttcagcacgtacttcaccggcttccacgacaacaggaagaacatgtacagcgacgaggacaagcacacggccatcgcctaccgcctcatccacgagaacctgccccgcttcatcgacaacctgcagatcctgacgaccatcaagcagaagcactccgccctgtacgaccagatcatcaacgagctcaccgcgagcggcctcgacgtgtccctcgccagccacctcgacggctaccacaagctcctgacccaggagggcatcaccgcctacaaccgcatcatcggcgaggtgaacggctacaccaacaagcacaaccagatctgccacaagtccgagaggatcgccaagctcaggcccctgcacaagcagatcctcagcgacggcatgggcgtgagcttcctcccgtccaagttcgccgacgactccgagatgtgccaggccgtgaacgagttctacaggcactacaccgacgtgttcgccaaggtgcagtccctgttcgacggcttcgacgaccaccagaaggacggcatctacgtggagcacaagaacctgaacgagctgtccaagcaggccttcggcgacttcgccctcctgggccgcgtgctggacggctactacgtggacgtcgtgaacccggagttcaacgagcgcttcgcgaaggcgaagacggacaacgcgaaggccaagctcaccaaggagaaggacaagttcatcaagggcgtccacagcctcgcgtccctggagcaggcgatcgagcaccacaccgcgcgccacgacgacgagtccgtgcaggccggcaagctcggccagtacttcaagcacggcctggccggcgtcgacaacccgatccagaagatccacaacaaccactccaccatcaagggcttcctggagagggagcgcccggcgggcgagcgcgcgctccccaagatcaagtccggcaagaaccccgagatgacgcagctcaggcagctgaaggagctgctcgacaacgcgctcaacgtggcgcacttcgccaagctgctcacgaccaagaccacgctggacaaccaggacggcaacttctacggcgagttcggcgtcctgtacgacgagctggcgaagatcccgaccctgtacaacaaggtccgcgactacctgagccagaagccctactccaccgagaagtacaagctcaacttcggcaacccgaccctcctgaacggctgggacctcaacaaggagaaggacaacttcggcgtgatcctccagaaggacggctgctactacctcgccctgctggacaaggcgcacaagaaggtcttcgacaacgccccgaacaccggcaagaacgtgtaccagaagatggtgtacaagctgctccccggccccaacaagatgctgccgaaggtgttcttcgcgaagtccaacctcgactactacaaccccagcgccgagctcctggacaagtacgccaagggcacgcacaagaagggcgacaacttcaacctcaaggactgccacgcgctgatcgacttcttcaaggcgggcatcaacaagcaccccgagtggcagcacttcggcttcaagttcagcccgacctccagctacagggacctcagcgacttctaccgcgaggtggagccccagggctaccaggtgaagttcgtcgacatcaacgccgactacatcgacgagctcgtcgagcagggcaagctctacctgttccagatctacaacaaggacttctccccgaaggcccacggcaagccgaacctccacacgctctacttcaaggccctcttcagcgaggacaacctggccgacccgatctacaagctcaacggcgaggcgcagatcttctaccgcaaggccagcctggacatgaacgaaacgaccatccacagggccggcgaggtcctggagaacaagaacccggacaacccgaagaagaggcagttcgtctacgacatcatcaaggacaagaggtacacccaggacaagttcatgctccacgtcccgatcaccatgaacttcggcgtccagggcatgaccatcaaggagttcaacaagaaggtcaaccagagcatccagcagtacgacgaggtgaacgtcatcggcatcgaccgcggcgagaggcacctgctctacctgacggtcatcaactccaagggcgagatcctcgagcagcgcagcctgaacgacatcacgaccgcgagcgccaacggcacgcaggtcaccacgccgtaccacaagatcctcgacaagcgcgagatcgagaggctgaacgcgcgcgtcggctggggcgagatcgaaacgatcaaggagctcaagtccggctacctcagccacgtcgtgcaccagatcaaccagctcatgctgaagtacaacgcgatcgtggtcctcgaggacctgaacttcggcttcaagaggggccgcttcaaggtggagaagcagatctaccagaacttcgagaacgccctgatcaagaagctcaaccacctggtcctcaaggacaaggcggacgacgagatcggcagctacaagaacgcgctccagctgaccaacaacttcacggacctcaagtccatcggcaagcagacgggcttcctgttctacgtgccggcgtggaacacctccaagatcgacccggaaaccggcttcgtcgacctgctcaagccgcgctacgagaacatcgcgcagtcccaggcgttcttcggcaagttcgacaagatctgctacaacaccgacaagggctacttcgagttccacatcgactacgcgaagttcaccgacaaggccaagaactccaggcagaagtgggccatctgcagccacggcgacaagcgctacgtgtacgacaagacggcgaaccagaacaagggcgcggccaagggcatcaacgtgaacgacgagctgaagtccctcttcgcgcgctaccacatcaacgacaagcagccgaacctcgtcatggacatctgccagaacaacgacaaggagttccacaagagcctgatgtgcctgctcaagaccctgctcgccctccgctactccaacgcgagctccgacgaggacttcatcctcagccccgtcgcgaacgacgagggcgtgttcttcaactccgccctcgcggacgacacgcagccgcagaacgccgacgcgaacggcgcctaccacatcgccctcaagggcctgtggctgctcaacgagctcaagaactccgacgacctgaacaaggtgaagctcgccattgacaaccagacgtggctgaatttcgctcagaatagggggggcgggggctcaggcgggggcgggagcggcggcgggggctctgggggcggcggcagcggcgggggcggcagcgggggcggcgggtcgccgaagaagaagcgcaaggtgtccggcggcagctccggcggcagcccgaagaagaagcgcaaagtgtgagggacccgatcgttcaaacatttggcaataaagtttcttaagattgaatcctgttgccggtcttgcgatgattatcatataatttctgttgaattacgttaagcatgtaataattaacatgtaatgcatgacgttatttatgagatgggtttttatgattagagtcccgcaattatacatttaatacgcgatagaaaacaaaatatagcgcgcaaactaggataaattatcgcgcgcggtgtcatctatgttactagatcggtaccgaattcattatgtggtctaggtaggttctatatataagaaaacttgaaatgttctaaaaaaaaattcaagcccatgcatgattgaagcaaacggtatagcaacggtgttaacctgatctagtgatctcttgcaatccttaacggccacctaccgcaggtagcaaacggcgtccccctcctcgatatctccgcggcgacctctggctttttccgcggaattgcgcggtggggacggattccacgagaccgcgacgcaaccgcctctcgccgctgggccccacaccgctcggtgccgtagcctcacgggactctttctccctcctcccccgttataaattggcttcatcccctccttgcctcatccatccaaatcccagtccccaatcccatcccttcgtaggagaaattcatcgaagctaagcgaatcctcgcgatcctctcaaggtactgcgagttttcgatccccctctcgacccctcgtatgtttgtgtttgtcgtagcgtttgattaggtatgctttccctgtttgtgttcgtcgtagcgtttgattaggtatgctttccctgttcgtgttcatcgtagtgtttgattaggtcgtgtgaggcgatggcctgctcgcgtccttcgatctgtagtcgatttgcgggtcgtggtgtagatctgcgggctgtgatgaagttatttggtgtgatctgctcgcctgattctgcgggttggctcgagtagatatgatggttggaccggttggttcgtttaccgcgctagggttgggctgggatgatgttgcatgcgccgttgcgcgtgatcccgcagcaggacttgcgtttgattgccagatctcgttacgattatgtgatttggtttggactttttagatctgtagcttctgcttatgtgccagatgcgcctactgctcatatgcctgatgataatcataaatggctgtggaactaactagttgattgcggagtcatgtatcagctacaggtgtagggactagctacaggtgtagggacttgcgtctaattgtttggtcctttactcatgttgcaattatgcaatttagtttagattgtttgttccactcatctaggctgtaaaagggacactgcttagattgctgtttaatctttttagtagattatattatattggtaacttattacccctattacatgccatacgtgacttctgctcatgcctgatgataatcatagatcactgtggaattaattagttgattgttgaatcatgtttcatgtacataccacggcacaattgcttagttccttaacaaatgcaaattttactgatccatgtatgatttgcgtggttctctaatgtgaaatactatagctacttgttagtaagaatcaggttcgtatgcttaatgctgtatgtgccttctgctcatgcctgatgataatcatatatcactggaattaattagttgatcgtttaatcatatatcaagtacataccatgccacaatttttagtcacttaacccatgcagattgaactggtccctgcatgttttgctaaattgttctattctgattagaccatatatcatgtatttttttttggtaatggttctcttattttaaatgctatatagttctggtacttgttagaaagatctgcttcatagtttagttgcctatccctcgaattaggatgctgagcagctgatcctatagctttgtttcatgtatcaattcttttgtgttcaacagtcagtttttgttagattcattgtaacttatggtcgcttactcttctggtcctcaatgcttgcagaagcttgaaattctgatgagtccgtgaggacgaaacgagtaagctcgtcaatttctactgtttgtagatgggaaagaccgaggagaagatctaatttctactgtttgtagatgcaccaaggaaggggaggagatcaatttctactgtttgtagatgtcacagatcacaaacttcaaatgaatttctactgtttgtagatacgcccagaaagcatacgcagtcggccggcatggtcccagcctcctcgctggcgccggctgggcaacatgcttcggcatggcgaatgggacgatcgttcaaacatttggcaataaagtttcttaagattgaatcctgttgccggtcttgcgatgattatcatataatttctgttgaattacgttaagcatgtaataattaacatgtaatgcatgacgttatttatgagatgggtttttatgattagagtcccgcaattatacatttaatacgcgatagaaaacaaaatatagcgcgcaaactaggataaattatcgcgcgcggtgtcatctatgttactagatccctaggctgcagtgcagcgtgacccggtcgtgcccctctctagagataatgagcattgcatgtctaagttataaaaaattaccacatattttttttgtcacacttgtttgaagtgcagtttatctatctttatacatatatttaaactttactctacgaataatataatctatagtactacaataatatcagtgttttagagaatcatataaatgaacagttagacatggtctaaaggacaattgagtattttgacaacaggactctacagttttatctttttagtgtgcatgtgttctcctttttttttgcaaatagcttcacctatataatacttcatccattttattagtacatccatttagggtttagggttaatggtttttatagactaatttttttagtacatctattttattctattttagcctctaaattaagaaaactaaaactctattttagtttttttatttaataatttagatataaaatagaataaaataaagtgactaaaaattaaacaaataccctttaagaaattaaaaaaactaaggaaacatttttcttgtttcgagtagataatgccagcctgttaaacgccgtcgacgagtctaacggacaccaaccagcgaaccagcagcgtcgcgtcgggccaagcgaagcagacggcacggcatctctgtcgctgcctctggacccctctcgagagttccgctccaccgttggacttgctccgctgtcggcatccagaaattgcgtggcggagcggcagacgtgagccggcacggcaggcggcctcctcctcctctcacggcaccggcagctacgggggattcctttcccaccgctccttcgctttcccttcctcgcccgccgtaataaatagacaccccctccacaccctctttccccaacctcgtgttgttcggagcgcacacacacacaaccagatctcccccaaatccacccgtcggcacctccgcttcaaggtacgccgctcgtcctccccccccccccctctctaccttctctagatcggcgttccggtccatggttagggcccggtagttctacttctgttcatgtttgtgttagatccgtgtttgtgttagatccgtgctgctagcgttcgtacacggatgcgacctgtacgtcagacacgttctgattgctaacttgccagtgtttctctttggggaatcctgggatggctctagccgttccgcagacgggatcgatttcatgattttttttgtttcgttgcatagggtttggtttgcccttttcctttatttcaatatatgccgtgcacttgtttgtcgggtcatcttttcatgcttttttttgtcttggttgtgatgatgtggtctggttgggcggtcgttctagatcggagtagaattctgtttcaaactacctggtggatttattaattttggatctgtatgtgtgtgccatacatattcatagttacgaattgaagatgatggatggaaatatcgatctaggataggtatacatgttgatgcgggttttactgatgcatatacagagatgctttttgttcgcttggttgtgatgatgtggtgtggttgggcggtcgttcattcgttctagatcggagtagaatactgtttcaaactacctggtgtatttattaattttggaactgtatgtgtgtgtcatacatcttcatagttacgagtttaagatggatggaaatatcgatctaggataggtatacatgttgatgtgggttttactgatgcatatacatgatggcatatgcagcatctattcatatgctctaaccttgagtacctatctattataataaacaagtatgttttataattattttgatcttgatatacttggatgatggcatatgcagcagctatatgtggatttttttagccctgccttcatacgctatttatttgcttggtactgtttcttttgtcgatgctcaccctgttgtttggtgttacttctgcagggatcaccgatcatgcaaaaactcattaactcagtgcaaaactatgcctggggcagcaaaacggcgttgactgaactttatggtatggaaaatccgtccagccagccgatggccgagctgtggatgggcgcacatccgaaaagcagttcacgagtgcagaatgccgccggagatatcgtttcactgcgtgatgtgattgagagtgataaatcgactctgctcggagaggccgttgccaaacgctttggcgaactgcctttcctgttcaaagtattatgcgcagcacagccactctccattcaggttcatccaaacaaacacaattctgaaatcggttttgccaaagaaaatgccgcaggtatcccgatggatgccgccgagcgtaactataaagatcctaaccacaagccggagctggtttttgcgctgacgcctttccttgcgatgaacgcgtttcgtgaattttccgagattgtctccctactccagccggtcgcaggtgcacatccggcgattgctcactttttacaacagcctgatgccgaacgtttaagcgaactgttcgccagcctgttgaatatgcagggtgaagaaaaatcccgcgcgctggcgattttaaaatcggccctcgatagccagcagggtgaaccgtggcaaacgattcgtttaatttctgaattttacccggaagacagcggtctgttctccccgctattgctgaatgtggtgaaattgaaccctggcgaagcgatgttcctgttcgctgaaacaccgcacgcttacctgcaaggcgtggcgctggaagtgatggcaaactccgataacgtgctgcgtgcgggtctgacgcctaaatacattgatattccggaactggttgccaatgtgaaattcgaagccaaaccggctaaccagttgttgacccagccggtgaaacaaggtgcagaactggacttcccgattccagtggatgattttgccttctcgctgcatgaccttagtgataaagaaaccaccattagccagcagagtgccgccattttgttctgcgtcgaaggcgatgcaacgttgtggaaaggttctcagcagttacagcttaaaccgggtgaatcagcgtttattgccgccaacgaatcaccggtgactgtcaaaggccacggccgtttagcgcgtgtttacaacaagctgtaagagcttactgaaaaaattaacatctcttgctaagctgggagctcgatccgtcgacctgcagatcgttcaaacatttggcaataaagtttcttaagattgaatcctgttgccggtcttgcgatgattatcatataatttctgttgaattacgttaagcatgtaataattaacatgtaatgcatgacgttatttatgagatgggtttttatgattagagtcccgcaattatacatttaatacgcgatagaaaacaaaatatagcgcgcaaactaggataaattatcgcgcgcggtgtcatctatgttactagatccggaccgcctgcaggcccgggggcgcgccctaattagctaacggccaggatcgccgcgtgagcctttagcaactagctagattaattaacgcaatctgttattaagttgtctaagcgtcaatttgtttacaccacaatatatcctgccaccagccagccaacagctccccgaccggcagctcggcacaaaatcaccactcgatacaggcagcccatcagaattaattctcatgtttgacagcttatcatcgactgcacggtgcaccaatgcttctggcgtcaggcagccatcggaagctgtggtatggctgtgcaggtcgtaaatcactgcataattcgtgtcgctcaaggcgcactcccgttctggataatgttttttgcgccgacatcataacggttctggcaaatattctgaaatgagctgttgacaattaatcatccggctcgtataatgtgtggaattgtgagcggataacaatttcacacaggaaacagaccatgagggaagcgttgatcgccgaagtatcgactcaactatcagaggtagttggcgtcatcgagcgccatctcgaaccgacgttgctggccgtacatttgtacggctccgcagtggatggcggcctgaagccacacagtgatattgatttgctggttacggtgaccgtaaggcttgatgaaacaacgcggcgagctttgatcaacgaccttttggaaacttcggcttcccctggagagagcgagattctccgcgctgtagaagtcaccattgttgtgcacgacgacatcattccgtggcgttatccagctaagcgcgaactgcaatttggagaatggcagcgcaatgacattcttgcaggtatcttcgagccagccacgatcgacattgatctggctatcttgctgacaaaagcaagagaacatagcgttgccttggtaggtccagcggcggaggaactctttgatccggttcctgaacaggatctatttgaggcgctaaatgaaaccttaacgctatggaactcgccgcccgactgggctggcgatgagcgaaatgtagtgcttacgttgtcccgcatttggtacagcgcagtaaccggcaaaatcgcgccgaaggatgtcgctgccgactgggcaatggagcgcctgccggcccagtatcagcccgtcatacttgaagctaggcaggcttatcttggacaagaagatcgcttggcctcgcgcgcagatcagttggaagaatttgttcactacgtgaaaggcgagatcaccaaagtagtcggcaaataaagctctagtggatctccgtacccagggatctggctcgcggcggacgcacgacgccggggcgagaccataggcgatctcctaaatcaatagtagctgtaacctcgaagcgtttcacttgtaacaacgattgagaatttttgtcataaaattgaaatacttggttcgcatttttgtcatccgcggtcagccgcaattctgacgaactgcccatttagctggagatgattgtacatccttcacgtgaaaatttctcaagcgctgtgaacaagggttcagattttagattgaaaggtgagccgttgaaacacgttcttcttgtcgatgacgacgtcgctatgcggcatcttattattgaataccttacgatccacgccttcaaagtgaccgcggtagccgacagcacccagttcacaagagtactctcttccgcgacggtcgatgtcgtggttgttgatctagatttaggtcgtgaagatgggctcgagatcgttcgtaatctggcggcaaagtctgatattccaatcataattatcagtggcgaccgccttgaggagacggataaagttgttgcactcgagctaggagcaagtgattttatcgctaagccgttcagtatcagagagtttctagcacgcattcgggttgccttgcgcgtgcgccccaacgttgtccgctccaaagaccgacggtctttttgttttactgactggacacttaatctcaggcaacgtcgcttgatgtccgaagctggcggtgaggtgaaacttacggcaggtgagttcaatcttctcctcgcgtttttagagaaaccccgcgacgttctatcgcgcgagcaacttctcattgccagtcgagtacgcgacgaggaggtttatgacaggagtatagatgttctcattttgaggctgcgccgcaaacttgaggcagatccgtcaagccctcaactgataaaaacagcaagaggtgccggttatttctttgacgcggacgtgcaggtttcgcacggggggacgatggcagcctgagccaattcccagatccccgaggaatcggcgtgagcggtcgcaaaccatccggcccggtacaaatcggcgcggcgctgggtgatgacctggtggagaagttgaaggccgcgcaggccgcccagcggcaacgcatcgaggcagaagcacgccccggtgaatcgtggcaagcggccgctgatcgaatccgcaaagaatcccggcaaccgccggcagccggtgcgccgtcgattaggaagccgcccaagggcgacgagcaaccagattttttcgttccgatgctctatgacgtgggcacccgcgatagtcgcagcatcatggacgtggccgttttccgtctgtcgaagcgtgaccgacgagctggcgaggtgatccgctacgagcttccagacgggcacgtagaggtttccgcagggccggccggcatggccagtgtgtgggattacgacctggtactgatggcggtttcccatctaaccgaatccatgaaccgataccgggaagggaagggagacaagcccggccgcgtgttccgtccacacgttgcggacgtactcaagttctgccggcgagccgatggcggaaagcagaaagacgacctggtagaaacctgcattcggttaaacaccacgcacgttgccatgcagcgtacgaagaaggccaagaacggccgcctggtgacggtatccgagggtgaagccttgattagccgctacaagatcgtaaagagcgaaaccgggcggccggagtacatcgagatcgagctggctgattggatgtaccgcgagatcacagaaggcaagaacccggacgtgctgacggttcaccccgattactttttgatcgatcccggcatcggccgttttctctaccgcctggcacgccgcgccgcaggcaaggcagaagccagatggttgttcaagacgatctacgaacgcagtggcagcgccggagagttcaagaagttctgtttcaccgtgcgcaagctgatcgggtcaaatgacctgccggagtacgatttgaaggaggaggcggggcaggctggcccgatcctagtcatgcgctaccgcaacctgatcgagggcgaagcatccgccggttcctaatgtacggagcagatgctagggcaaattgccctagcaggggaaaaaggtcgaaaaggtctctttcctgtggatagcacgtacattgggaacccaaagccgtacattgggaaccggaacccgtacattgggaacccaaagccgtacattgggaaccggtcacacatgtaagtgactgatataaaagagaaaaaaggcgatttttccgcctaaaactctttaaaacttattaaaactcttaaaacccgcctggcctgtgcataactgtctggccagcgcacagccgaagagctgcaaaaagcgcctacccttcggtcgctgcgctccctacgccccgccgcttcgcgtcggcctatcgcggccgctggccgctcaaaaatggctggcctacggccaggcaatctaccagggcgcggacaagccgcgccgtcgccactcgaccgccggcgctgaggtctgcctcgtgaagaaggtgttgctgactcataccaggcctgaatcgccccatcatccagccagaaagtgagggagccacggttgatgagagctttgttgtaggtggaccagttggtgattttgaacttttgctttgccacggaacggtctgcgttgtcgggaagatgcgtgatctgatccttcaactcagcaaaagttcgatttattcaacaaagccgccgtcccgtcaagtcagcgtaatgctctgccagtgttacaaccaattaaccaattctgattagaaaaactcatcgagcatcaaatgaaactgcaatttattcatatcaggattatcaataccatatttttgaaaaagccgtttctgtaatgaaggagaaaactcaccgaggcagttccataggatggcaagatcctggtatcggtctgcgattccgactcgtccaacatcaatacaacctattaatttcccctcgtcaaaaataaggttatcaagtgagaaatcaccatgagtgacgactgaatccggtgagaatggcaaaagctctgcattaatgaatcggccaacgcgcggggagaggcggtttgcgtattgggcgctcttccgcttcctcgctcactgactcgctgcgctcggtcgttcggctgcggcgagcggtatcagctcactcaaaggcggtaatacggttatccacagaatcaggggataacgcaggaaagaacatgtgagcaaaaggccagcaaaaggccaggaaccgtaaaaaggccgcgttgctggcgtttttccataggctccgcccccctgacgagcatcacaaaaatcgacgctcaagtcagaggtggcgaaacccgacaggactataaagataccaggcgtttccccctggaagctccctcgtgcgctctcctgttccgaccctgccgcttaccggatacctgtccgcctttctcccttcgggaagcgtggcgctttctcatagctcacgctgtaggtatctcagttcggtgtaggtcgttcgctccaagctgggctgtgtgcacgaaccccccgttcagcccgaccgctgcgccttatccggtaactatcgtcttgagtccaacccggtaagacacgacttatcgccactggcagcagccactggtaacaggattagcagagcgaggtatgtaggcggtgctacagagttcttgaagtggtggcctaactacggctacactagaagaacagtatttggtatctgcgctctgctgaagccagttaccttcggaaaaagagttggtagctcttgatccggcaaacaaaccaccgctggtagcggtggtttttttgtttgcaagcagcagattacgcgcagaaaaaaaggatctcaagaagatcctttgatcttttctacggggtctgacgctcagtggaacgaaaactcacgttaagggattttggtcatgagattatcaaaaaggatcttcacctagatccttttgatccggaatta

SEQ ID NO: 82 - DNA, 17531 bp, synthetic construct
  source 1..17531: mol_type = other DNA
attcctgtggttggcatgcacatacaaatggacgaacggataaaccttttcacgcccttttaaatatccgattattctaataaacgctcttttctcttaggtttacccgccaatatatcctgtcaaacactgatagtttaaactggcactagcctaacggtgttgactaactaggccgcttccctaattagctaacccgggggcgcgccgggaccggaattcattatgtggtctaggtaggttctatatataagaaaacttgaaatgttctaaaaaaaaattcaagcccatgcatgattgaagcaaacggtatagcaacggtgttaacctgatctagtgatctcttgcaatccttaacggccacctaccgcaggtagcaaacggcgtccccctcctcgatatctccgcggcgacctctggctttttccgcggaattgcgcggtggggacggattccacgagaccgcgacgcaaccgcctctcgccgctgggccccacaccgctcggtgccgtagcctcacgggactctttctccctcctcccccgttataaattggcttcatcccctccttgcctcatccatccaaatcccagtccccaatcccatcccttcgtaggagaaattcatcgaagctaagcgaatcctcgcgatcctctcaaggtactgcgagttttcgatccccctctcgacccctcgtatgtttgtgtttgtcgtagcgtttgattaggtatgctttccctgtttgtgttcgtcgtagcgtttgattaggtatgctttccctgttcgtgttcatcgtagtgtttgattaggtcgtgtgaggcgatggcctgctcgcgtccttcgatctgtagtcgatttgcgggtcgtggtgtagatctgcgggctgtgatgaagttatttggtgtgatctgctcgcctgattctgcgggttggctcgagtagatatgatggttggaccggttggttcgtttaccgcgctagggttgggctgggatgatgttgcatgcgccgttgcgcgtgatcccgcagcaggacttgcgtttgattgccagatctcgttacgattatgtgatttggtttggactttttagatctgtagcttctgcttatgtgccagatgcgcctactgctcatatgcctgatgataatcataaatggctgtggaactaactagttgattgcggagtcatgtatcagctacaggtgtagggactagctacaggtgtagggacttgcgtctaattgtttggtcctttactcatgttgcaattatgcaatttagtttagattgtttgttccactcatctaggctgtaaaagggacactgcttagattgctgtttaatctttttagtagattatattatattggtaacttattacccctattacatgccatacgtgacttctgctcatgcctgatgataatcatagatcactgtggaattaattagttgattgttgaatcatgtttcatgtacataccacggcacaattgcttagttccttaacaaatgcaaattttactgatccatgtatgatttgcgtggttctctaatgtgaaatactatagctacttgttagtaagaatcaggttcgtatgcttaatgctgtatgtgccttctgctcatgcctgatgataatcatatatcactggaattaattagttgatcgtttaatcatatatcaagtacataccatgccacaatttttagtcacttaacccatgcagattgaactggtccctgcatgttttgctaaattgttctattctgattagaccatatatcatgtatttttttttggtaatggttctcttattttaaatgctatatagttctggtacttgttagaaagatctgcttcatagtttagttgcctatccctcgaattaggatgctgagcagctgatcctatagctttgtttcatgtatcaattcttttgtgttcaacagtcagtttttgttagattcattgtaacttatggtcgcttactcttctggtcctcaatgcttgcagggatcccctaaatagaccatgccgaagaagaagcgcaaggtcgggggcgggggctcaggcgggggcgggagcggcggcgggggctctgggggcggcggcagcggcgggggcggcagcgggggcggcgggtcgatgctgttccaggatttcactcatctgtaccctctctcaaagactgttcggttcgagctcaagcctattgggcggactctggagcacatccacgcgaagaacttcctcagccaggacgaaaccatggccgacatgtaccagaaggtcaaggtcatcctcgacgactaccacagggacttcatcgcggacatgatgggcgaggtgaagctgacgaagctcgccgagttctacgacgtctacctcaagttccgcaagaacccgaaggacgacggcctccagaagcagctcaaggacctgcaggccgtcctgaggaaggagtccgtcaagcccatcggcagcggcggcaagtacaagaccggctacgacaggctgttcggcgccaagctgttcaaggacggcaaggagctcggcgacctggcgaagttcgtgatcgcgcaggagggcgagagctcccccaagctggcccacctggcccacttcgagaagttcagcacgtacttcaccggcttccacgacaacaggaagaacatgtacagcgacgaggacaagcacacggccatcgcctaccgcctcatccacgagaacctgccccgcttcatcgacaacctgcagatcctgacgaccatcaagcagaagcactccgccctgtacgaccagatcatcaacgagctcaccgcgagcggcctcgacgtgtccctcgccagccacctcgacggctaccacaagctcctgacccaggagggcatcaccgcctacaaccgcatcatcggcgaggtgaacggctacaccaacaagcacaaccagatctgccacaagtccgagaggatcgccaagctcaggcccctgcacaagcagatcctcagcgacggcatgggcgtgagcttcctcccgtccaagttcgccgacgactccgagatgtgccaggccgtgaacgagttctacaggcactacaccgacgtgttcgccaaggtgcagtccctgttcgacggcttcgacgaccaccagaaggacggcatctacgtggagcacaagaacctgaacgagctgtccaagcaggccttcggcgacttcgccctcctgggccgcgtgctggacggctactacgtggacgtcgtgaacccggagttcaacgagcgcttcgcgaaggcgaagacggacaacgcgaaggccaagctcaccaaggagaaggacaagttcatcaagggcgtccacagcctcgcgtccctggagcaggcgatcgagcaccacaccgcgcgccacgacgacgagtccgtgcaggccggcaagctcggccagtacttcaagcacggcctggccggcgtcgacaacccgatccagaagatccacaacaaccactccaccatcaagggcttcctggagagggagcgcccggcgggcgagcgcgcgctccccaagatcaagtccggcaagaaccccgagatgacgcagctcaggcagctgaaggagctgctcgacaacgcgctcaacgtggcgcacttcgccaagctgctcacgaccaagaccacgctggacaaccaggacggcaacttctacggcgagttcggcgtcctgtacgacgagctggcgaagatcccgaccctgtacaacaaggtccgcgactacctgagccagaagcccttctccaccgagaagtacaagctcaacttcggcaacccgaccctcctgaacggctgggacctcaacaaggagaaggacaacttcggcgtgatcctccagaaggacggctgctactacctcgccctgctggacaaggcgcacaagaaggtcttcgacaacgccccgaacaccggcaagaacgtgtaccagaagatggtgtacaagctgctccccggccccaacaagatgctgccgaaggtgttcttcgcgaagtccaacctcgactactacaaccccagcgccgagctcctggacaagtacgccaagggcacgcacaagaagggcgacaacttcaacctcaaggactgccacgcgctgatcgacttcttcaaggcgggcatcaacaagcaccccgagtggcagcacttcggcttcaagttcagcccgacctccagctacagggacctcagcgacttctaccgcgaggtggagccccagggctaccaggtgaagttcgtcgacatcaacgccgactacatcgacgagctcgtcgagcagggcaagctctacctgttccagatctacaacaaggacttctccccgaagtcccacggcaagccgaacctccacacgctctacttcaaggccctcttcagcgaggacaacctggccgacccgatctacaagctcaacggcgaggcgcagatcttctaccgcaaggccagcctggacatgaacgaaacgaccatccacagggccggcgaggtcctggagaacaagaacccggacaacccgaagaagaggcagttcgtctacgacatcatcaaggacaagaggtacacccaggacaagttcatgctccacgtcccgatcaccatgaacttcggcgtccagggcatgaccatcaaggagttcaacaagaaggtcaaccagagcatccagcagtacgacgaggtgaacgtcatcggcatcgaccgcggcgagaggcacctgctctacctgacggtcatcaactccaagggcgagatcctcgagcagcgcagcctgaacgacatcacgaccgcgagcgccaacggcacgcaggtcaccacgccgtaccacaagatcctcgacaagcgcgagatcgagaggctgaacgcgcgcgtcggctggggcgagatcgaaacgatcaaggagctcaagtccggctacctcagccacgtcgtgcaccagatcaaccagctcatgctgaagtacaacgcgatcgtggtcctcgaggacctgaacttcggcttcaagaggggccgcttcaaggtggagaagcagatctaccagaacttcgagaacgccctgatcaagaagctcaaccacctggtcctcaaggacaaggcggacgacgagatcggcagctacaagaacgcgctccagctgaccaacaacttcacggacctcaagtccatcggcaagcagacgggcttcctgttctacgtgccggcgtggaacacctccaagatcgacccggaaaccggcttcgtcgacctgctcaagccgcgctacgagaacatcgcgcagtcccaggcgttcttcggcaagttcgacaagatctgctacaacaccgacaagggctacttcgagttccacatcgactacgcgaagttcaccgacaaggccaagaactccaggcagaagtgggccatctgcagccacggcgacaagcgctacgtgtacgacaagacggcgaaccagaacaagggcgcggccaagggcatcaacgtgaacgacgagctgaagtccctcttcgcgcgctaccacatcaacgacaagcagccgaacctcgtcatggacatctgccagaacaacgacaaggagttccacaagagcctgatgtgcctgctcaagaccctgctcgccctccgctactccaacgcgagctccgacgaggacttcatcctcagccccgtcgcgaacgacgagggcgtgttcttcaactccgccctcgcggacgacacgcagccgcagaacgccgacgcgaacggcgcctaccacatcgccctcaagggcctgtggctgctcaacgagctcaagaactccgacgacctgaacaaggtgaagctcgccattgacaaccagacgtggctgaatttcgctcagaatagggggggcgggggctcaggcgggggcgggagcggcggcgggggctctgggggcggcggcagcggcgggggcggcagcgggggcggcgggtcgccgaagaagaagcgcaaggtgtccggcggcagctccggcggcagcccgaagaagaagcgcaaagtgtgagggacccgatcgttcaaacatttggcaataaagtttcttaagattgaatcctgttgccggtcttgcgatgattatcatataatttctgttgaattacgttaagcatgtaataattaacatgtaatgcatgacgttatttatgagatgggtttttatgattagagtcccgcaattatacatttaatacgcgatagaaaacaaaatatagcgcgcaaactaggataaattatcgcgcgcggtgtcatctatgttactagatcggtaccgaattcattatgtggtctaggtaggttctatatataagaaaacttgaaatgttctaaaaaaaaattcaagcccatgcatgattgaagcaaacggtatagcaacggtgttaacctgatctagtgatctcttgcaatccttaacggccacctaccgcaggtagcaaacggcgtccccctcctcgatatctccgcggcgacctctggctttttccgcggaattgcgcggtggggacggattccacgagaccgcgacgcaaccgcctctcgccgctgggccccacaccgctcggtgccgtagcctcacgggactctttctccctcctcccccgttataaattggcttcatcccctccttgcctcatccatccaaatcccagtccccaatcccatcccttcgtaggagaaattcatcgaagctaagcgaatcctcgcgatcctctcaaggtactgcgagttttcgatccccctctcgacccctcgtatgtttgtgtttgtcgtagcgtttgattaggtatgctttccctgtttgtgttcgtcgtagcgtttgattaggtatgctttccctgttcgtgttcatcgtagtgtttgattaggtcgtgtgaggcgatggcctgctcgcgtccttcgatctgtagtcgatttgcgggtcgtggtgtagatctgcgggctgtgatgaagttatttggtgtgatctgctcgcctgattctgcgggttggctcgagtagatatgatggttggaccggttggttcgtttaccgcgctagggttgggctgggatgatgttgcatgcgccgttgcgcgtgatcccgcagcaggacttgcgtttgattgccagatctcgttacgattatgtgatttggtttggactttttagatctgtagcttctgcttatgtgccagatgcgcctactgctcatatgcctgatgataatcataaatggctgtggaactaactagttgattgcggagtcatgtatcagctacaggtgtagggactagctacaggtgtagggacttgcgtctaattgtttggtcctttactcatgttgcaattatgcaatttagtttagattgtttgttccactcatctaggctgtaaaagggacactgcttagattgctgtttaatctttttagtagattatattatattggtaacttattacccctattacatgccatacgtgacttctgctcatgcctgatgataatcatagatcactgtggaattaattagttgattgttgaatcatgtttcatgtacataccacggcacaattgcttagttccttaacaaatgcaaattttactgatccatgtatgatttgcgtggttctctaatgtgaaatactatagctacttgttagtaagaatcaggttcgtatgcttaatgctgtatgtgccttctgctcatgcctgatgataatcatatatcactggaattaattagttgatcgtttaatcatatatcaagtacataccatgccacaatttttagtcacttaacccatgcagattgaactggtccctgcatgttttgctaaattgttctattctgattagaccatatatcatgtatttttttttggtaatggttctcttattttaaatgctatatagttctggtacttgttagaaagatctgcttcatagtttagttgcctatccctcgaattaggatgctgagcagctgatcctatagctttgtttcatgtatcaattcttttgtgttcaacagtcagtttttgttagattcattgtaacttatggtcgcttactcttctggtcctcaatgcttgcagaagcttgaaattctgatgagtccgtgaggacgaaacgagtaagctcgtcaatttctactgtttgtagatgggaaagaccgaggagaagatctaatttctactgtttgtagatgcaccaaggaaggggaggagatcaatttctactgtttgtagatgtcacagatcacaaacttcaaatgaatttctactgtttgtagatacgcccagaaagcatacgcagtcggccggcatggtcccagcctcctcgctggcgccggctgggcaacatgcttcggcatggcgaatgggacgatcgttcaaacatttggcaataaagtttcttaagattgaatcctgttgccggtcttgcgatgattatcatataatttctgttgaattacgttaagcatgtaataattaacatgtaatgcatgacgttatttatgagatgggtttttatgattagagtcccgcaattatacatttaatacgcgatagaaaacaaaatatagcgcgcaaactaggataaattatcgcgcgcggtgtcatctatgttactagatccctaggctgcagtgcagcgtgacccggtcgtgcccctctctagagataatgagcattgcatgtctaagttataaaaaattaccacatattttttttgtcacacttgtttgaagtgcagtttatctatctttatacatatatttaaactttactctacgaataatataatctatagtactacaataatatcagtgttttagagaatcatataaatgaacagttagacatggtctaaaggacaattgagtattttgacaacaggactctacagttttatctttttagtgtgcatgtgttctcctttttttttgcaaatagcttcacctatataatacttcatccattttattagtacatccatttagggtttagggttaatggtttttatagactaatttttttagtacatctattttattctattttagcctctaaattaagaaaactaaaactctattttagtttttttatttaataatttagatataaaatagaataaaataaagtgactaaaaattaaacaaataccctttaagaaattaaaaaaactaaggaaacatttttcttgtttcgagtagataatgccagcctgttaaacgccgtcgacgagtctaacggacaccaaccagcgaaccagcagcgtcgcgtcgggccaagcgaagcagacggcacggcatctctgtcgctgcctctggacccctctcgagagttccgctccaccgttggacttgctccgctgtcggcatccagaaattgcgtggcggagcggcagacgtgagccggcacggcaggcggcctcctcctcctctcacggcaccggcagctacgggggattcctttcccaccgctccttcgctttcccttcctcgcccgccgtaataaatagacaccccctccacaccctctttccccaacctcgtgttgttcggagcgcacacacacacaaccagatctcccccaaatccacccgtcggcacctccgcttcaaggtacgccgctcgtcctccccccccccccctctctaccttctctagatcggcgttccggtccatggttagggcccggtagttctacttctgttcatgtttgtgttagatccgtgtttgtgttagatccgtgctgctagcgttcgtacacggatgcgacctgtacgtcagacacgttctgattgctaacttgccagtgtttctctttggggaatcctgggatggctctagccgttccgcagacgggatcgatttcatgattttttttgtttcgttgcatagggtttggtttgcccttttcctttatttcaatatatgccgtgcacttgtttgtcgggtcatcttttcatgcttttttttgtcttggttgtgatgatgtggtctggttgggcggtcgttctagatcggagtagaattctgtttcaaactacctggtggatttattaattttggatctgtatgtgtgtgccatacatattcatagttacgaattgaagatgatggatggaaatatcgatctaggataggtatacatgttgatgcgggttttactgatgcatatacagagatgctttttgttcgcttggttgtgatgatgtggtgtggttgggcggtcgttcattcgttctagatcggagtagaatactgtttcaaactacctggtgtatttattaattttggaactgtatgtgtgtgtcatacatcttcatagttacgagtttaagatggatggaaatatcgatctaggataggtatacatgttgatgtgggttttactgatgcatatacatgatggcatatgcagcatctattcatatgctctaaccttgagtacctatctattataataaacaagtatgttttataattattttgatcttgatatacttggatgatggcatatgcagcagctatatgtggatttttttagccctgccttcatacgctatttatttgcttggtactgtttcttttgtcgatgctcaccctgttgtttggtgttacttctgcagggatcaccgatcatgcaaaaactcattaactcagtgcaaaactatgcctggggcagcaaaacggcgttgactgaactttatggtatggaaaatccgtccagccagccgatggccgagctgtggatgggcgcacatccgaaaagcagttcacgagtgcagaatgccgccggagatatcgtttcactgcgtgatgtgattgagagtgataaatcgactctgctcggagaggccgttgccaaacgctttggcgaactgcctttcctgttcaaagtattatgcgcagcacagccactctccattcaggttcatccaaacaaacacaattctgaaatcggttttgccaaagaaaatgccgcaggtatcccgatggatgccgccgagcgtaactataaagatcctaaccacaagccggagctggtttttgcgctgacgcctttccttgcgatgaacgcgtttcgtgaattttccgagattgtctccctactccagccggtcgcaggtgcacatccggcgattgctcactttttacaacagcctgatgccgaacgtttaagcgaactgttcgccagcctgttgaatatgcagggtgaagaaaaatcccgcgcgctggcgattttaaaatcggccctcgatagccagcagggtgaaccgtggcaaacgattcgtttaatttctgaattttacccggaagacagcggtctgttctccccgctattgctgaatgtggtgaaattgaaccctggcgaagcgatgttcctgttcgctgaaacaccgcacgcttacctgcaaggcgtggcgctggaagtgatggcaaactccgataacgtgctgcgtgcgggtctgacgcctaaatacattgatattccggaactggttgccaatgtgaaattcgaagccaaaccggctaaccagttgttgacccagccggtgaaacaaggtgcagaactggacttcccgattccagtggatgattttgccttctcgctgcatgaccttagtgataaagaaaccaccattagccagcagagtgccgccattttgttctgcgtcgaaggcgatgcaacgttgtggaaaggttctcagcagttacagcttaaaccgggtgaatcagcgtttattgccgccaacgaatcaccggtgactgtcaaaggccacggccgtttagcgcgtgtttacaacaagctgtaagagcttactgaaaaaattaacatctcttgctaagctgggagctcgatccgtcgacctgcagatcgttcaaacatttggcaataaagtttcttaagattgaatcctgttgccggtcttgcgatgattatcatataatttctgttgaattacgttaagcatgtaataattaacatgtaatgcatgacgttatttatgagatgggtttttatgattagagtcccgcaattatacatttaatacgcgatagaaaacaaaatatagcgcgcaaactaggataaattatcgcgcgcggtgtcatctatgttactagatccggaccgcctgcaggcccgggggcgcgccctaattagctaacggccaggatcgccgcgtgagcctttagcaactagctagattaattaacgcaatctgttattaagttgtctaagcgtcaatttgtttacaccacaatatatcctgccaccagccagccaacagctccccgaccggcagctcggcacaaaatcaccactcgatacaggcagcccatcagaattaattctcatgtttgacagcttatcatcgactgcacggtgcaccaatgcttctggcgtcaggcagccatcggaagctgtggtatggctgtgcaggtcgtaaatcactgcataattcgtgtcgctcaaggcgcactcccgttctggataatgttttttgcgccgacatcataacggttctggcaaatattctgaaatgagctgttgacaattaatcatccggctcgtataatgtgtggaattgtgagcggataacaatttcacacaggaaacagaccatgagggaagcgttgatcgccgaagtatcgactcaactatcagaggtagttggcgtcatcgagcgccatctcgaaccgacgttgctggccgtacatttgtacggctccgcagtggatggcggcctgaagccacacagtgatattgatttgctggttacggtgaccgtaaggcttgatgaaacaacgcggcgagctttgatcaacgaccttttggaaacttcggcttcccctggagagagcgagattctccgcgctgtagaagtcaccattgttgtgcacgacgacatcattccgtggcgttatccagctaagcgcgaactgcaatttggagaatggcagcgcaatgacattcttgcaggtatcttcgagccagccacgatcgacattgatctggctatcttgctgacaaaagcaagagaacatagcgttgccttggtaggtccagcggcggaggaactctttgatccggttcctgaacaggatctatttgaggcgctaaatgaaaccttaacgctatggaactcgccgcccgactgggctggcgatgagcgaaatgtagtgcttacgttgtcccgcatttggtacagcgcagtaaccggcaaaatcgcgccgaaggatgtcgctgccgactgggcaatggagcgcctgccggcccagtatcagcccgtcatacttgaagctaggcaggcttatcttggacaagaagatcgcttggcctcgcgcgcagatcagttggaagaatttgttcactacgtgaaaggcgagatcaccaaagtagtcggcaaataaagctctagtggatctccgtacccagggatctggctcgcggcggacgcacgacgccggggcgagaccataggcgatctcctaaatcaatagtagctgtaacctcgaagcgtttcacttgtaacaacgattgagaatttttgtcataaaattgaaatacttggttcgcatttttgtcatccgcggtcagccgcaattctgacgaactgcccatttagctggagatgattgtacatccttcacgtgaaaatttctcaagcgctgtgaacaagggttcagattttagattgaaaggtgagccgttgaaacacgttcttcttgtcgatgacgacgtcgctatgcggcatcttattattgaataccttacgatccacgccttcaaagtgaccgcggtagccgacagcacccagttcacaagagtactctcttccgcgacggtcgatgtcgtggttgttgatctagatttaggtcgtgaagatgggctcgagatcgttcgtaatctggcggcaaagtctgatattccaatcataattatcagtggcgaccgccttgaggagacggataaagttgttgcactcgagctaggagcaagtgattttatcgctaagccgttcagtatcagagagtttctagcacgcattcgggttgccttgcgcgtgcgccccaacgttgtccgctccaaagaccgacggtctttttgttttactgactggacacttaatctcaggcaacgtcgcttgatgtccgaagctggcggtgaggtgaaacttacggcaggtgagttcaatcttctcctcgcgtttttagagaaaccccgcgacgttctatcgcgcgagcaacttctcattgccagtcgagtacgcgacgaggaggtttatgacaggagtatagatgttctcattttgaggctgcgccgcaaacttgaggcagatccgtcaagccctcaactgataaaaacagcaagaggtgccggttatttctttgacgcggacgtgcaggtttcgcacggggggacgatggcagcctgagccaattcccagatccccgaggaatcggcgtgagcggtcgcaaaccatccggcccggtacaaatcggcgcggcgctgggtgatgacctggtggagaagttgaaggccgcgcaggccgcccagcggcaacgcatcgaggcagaagcacgccccggtgaatcgtggcaagcggccgctgatcgaatccgcaaagaatcccggcaaccgccggcagccggtgcgccgtcgattaggaagccgcccaagggcgacgagcaaccagattttttcgttccgatgctctatgacgtgggcacccgcgatagtcgcagcatcatggacgtggccgttttccgtctgtcgaagcgtgaccgacgagctggcgaggtgatccgctacgagcttccagacgggcacgtagaggtttccgcagggccggccggcatggccagtgtgtgggattacgacctggtactgatggcggtttcccatctaaccgaatccatgaaccgataccgggaagggaagggagacaagcccggccgcgtgttccgtccacacgttgcggacgtactcaagttctgccggcgagccgatggcggaaagcagaaagacgacctggtagaaacctgcattcggttaaacaccacgcacgttgccatgcagcgtacgaagaaggccaagaacggccgcctggtgacggtatccgagggtgaagccttgattagccgctacaagatcgtaaagagcgaaaccgggcggccggagtacatcgagatcgagctggctgattggatgtaccgcgagatcacagaaggcaagaacccggacgtgctgacggttcaccccgattactttttgatcgatcccggcatcggccgttttctctaccgcctggcacgccgcgccgcaggcaaggcagaagccagatggttgttcaagacgatctacgaacgcagtggcagcgccggagagttcaagaagttctgtttcaccgtgcgcaagctgatcgggtcaaatgacctgccggagtacgatttgaaggaggaggcggggcaggctggcccgatcctagtcatgcgctaccgcaacctgatcgagggcgaagcatccgccggttcctaatgtacggagcagatgctagggcaaattgccctagcaggggaaaaaggtcgaaaaggtctctttcctgtggatagcacgtacattgggaacccaaagccgtacattgggaaccggaacccgtacattgggaacccaaagccgtacattgggaaccggtcacacatgtaagtgactgatataaaagagaaaaaaggcgatttttccgcctaaaactctttaaaacttattaaaactcttaaaacccgcctggcctgtgcataactgtctggccagcgcacagccgaagagctgcaaaaagcgcctacccttcggtcgctgcgctccctacgccccgccgcttcgcgtcggcctatcgcggccgctggccgctcaaaaatggctggcctacggccaggcaatctaccagggcgcggacaagccgcgccgtcgccactcgaccgccggcgctgaggtctgcctcgtgaagaaggtgttgctgactcataccaggcctgaatcgccccatcatccagccagaaagtgagggagccacggttgatgagagctttgttgtaggtggaccagttggtgattttgaacttttgctttgccacggaacggtctgcgttgtcgggaagatgcgtgatctgatccttcaactcagcaaaagttcgatttattcaacaaagccgccgtcccgtcaagtcagcgtaatgctctgccagtgttacaaccaattaaccaattctgattagaaaaactcatcgagcatcaaatgaaactgcaatttattcatatcaggattatcaataccatatttttgaaaaagccgtttctgtaatgaaggagaaaactcaccgaggcagttccataggatggcaagatcctggtatcggtctgcgattccgactcgtccaacatcaatacaacctattaatttcccctcgtcaaaaataaggttatcaagtgagaaatcaccatgagtgacgactgaatccggtgagaatggcaaaagctctgcattaatgaatcggccaacgcgcggggagaggcggtttgcgtattgggcgctcttccgcttcctcgctcactgactcgctgcgctcggtcgttcggctgcggcgagcggtatcagctcactcaaaggcggtaatacggttatccacagaatcaggggataacgcaggaaagaacatgtgagcaaaaggccagcaaaaggccaggaaccgtaaaaaggccgcgttgctggcgtttttccataggctccgcccccctgacgagcatcacaaaaatcgacgctcaagtcagaggtggcgaaacccgacaggactataaagataccaggcgtttccccctggaagctccctcgtgcgctctcctgttccgaccctgccgcttaccggatacctgtccgcctttctcccttcgggaagcgtggcgctttctcatagctcacgctgtaggtatctcagttcggtgtaggtcgttcgctccaagctgggctgtgtgcacgaaccccccgttcagcccgaccgctgcgccttatccggtaactatcgtcttgagtccaacccggtaagacacgacttatcgccactggcagcagccactggtaacaggattagcagagcgaggtatgtaggcggtgctacagagttcttgaagtggtggcctaactacggctacactagaagaacagtatttggtatctgcgctctgctgaagccagttaccttcggaaaaagagttggtagctcttgatccggcaaacaaaccaccgctggtagcggtggtttttttgtttgcaagcagcagattacgcgcagaaaaaaaggatctcaagaagatcctttgatcttttctacggggtctgacgctcagtggaacgaaaactcacgttaagggattttggtcatgagattatcaaaaaggatcttcacctagatccttttgatccggaatta

SEQ ID NO: 83 - DNA, 17531 bp, synthetic construct
  source 1..17531: mol_type = other DNA
attcctgtggttggcatgcacatacaaatggacgaacggataaaccttttcacgcccttttaaatatccgattattctaataaacgctcttttctcttaggtttacccgccaatatatcctgtcaaacactgatagtttaaactggcactagcctaacggtgttgactaactaggccgcttccctaattagctaacccgggggcgcgccgggaccggaattcattatgtggtctaggtaggttctatatataagaaaacttgaaatgttctaaaaaaaaattcaagcccatgcatgattgaagcaaacggtatagcaacggtgttaacctgatctagtgatctcttgcaatccttaacggccacctaccgcaggtagcaaacggcgtccccctcctcgatatctccgcggcgacctctggctttttccgcggaattgcgcggtggggacggattccacgagaccgcgacgcaaccgcctctcgccgctgggccccacaccgctcggtgccgtagcctcacgggactctttctccctcctcccccgttataaattggcttcatcccctccttgcctcatccatccaaatcccagtccccaatcccatcccttcgtaggagaaattcatcgaagctaagcgaatcctcgcgatcctctcaaggtactgcgagttttcgatccccctctcgacccctcgtatgtttgtgtttgtcgtagcgtttgattaggtatgctttccctgtttgtgttcgtcgtagcgtttgattaggtatgctttccctgttcgtgttcatcgtagtgtttgattaggtcgtgtgaggcgatggcctgctcgcgtccttcgatctgtagtcgatttgcgggtcgtggtgtagatctgcgggctgtgatgaagttatttggtgtgatctgctcgcctgattctgcgggttggctcgagtagatatgatggttggaccggttggttcgtttaccgcgctagggttgggctgggatgatgttgcatgcgccgttgcgcgtgatcccgcagcaggacttgcgtttgattgccagatctcgttacgattatgtgatttggtttggactttttagatctgtagcttctgcttatgtgccagatgcgcctactgctcatatgcctgatgataatcataaatggctgtggaactaactagttgattgcggagtcatgtatcagctacaggtgtagggactagctacaggtgtagggacttgcgtctaattgtttggtcctttactcatgttgcaattatgcaatttagtttagattgtttgttccactcatctaggctgtaaaagggacactgcttagattgctgtttaatctttttagtagattatattatattggtaacttattacccctattacatgccatacgtgacttctgctcatgcctgatgataatcatagatcactgtggaattaattagttgattgttgaatcatgtttcatgtacataccacggcacaattgcttagttccttaacaaatgcaaattttactgatccatgtatgatttgcgtggttctctaatgtgaaatactatagctacttgttagtaagaatcaggttcgtatgcttaatgctgtatgtgccttctgctcatgcctgatgataatcatatatcactggaattaattagttgatcgtttaatcatatatcaagtacataccatgccacaatttttagtcacttaacccatgcagattgaactggtccctgcatgttttgctaaattgttctattctgattagaccatatatcatgtatttttttttggtaatggttctcttattttaaatgctatatagttctggtacttgttagaaagatctgcttcatagtttagttgcctatccctcgaattaggatgctgagcagctgatcctatagctttgtttcatgtatcaattcttttgtgttcaacagtcagtttttgttagattcattgtaacttatggtcgcttactcttctggtcctcaatgcttgcagggatcccctaaatagaccatgccgaagaagaagcgcaaggtcgggggcgggggctcaggcgggggcgggagcggcggcgggggctctgggggcggcggcagcggcgggggcggcagcgggggcggcgggtcgatgctgttccaggatttcactcatctgtaccctctctcaaagactgttcggttcgagctcaagcctattgggcggactctggagcacatccacgcgaagaacttcctcagccaggacgaaaccatggccgacatgtaccagaaggtcaaggtcatcctcgacgactaccacagggacttcatcgcggacatgatgggcgaggtgaagctgacgaagctcgccgagttctacgacgtctacctcaagttccgcaagaacccgaaggacgacggcctccagaagcagctcaaggacctgcaggccgtcctgaggaaggagtccgtcaagcccatcggcagcggcggcaagtacaagaccggctacgacaggctgttcggcgccaagctgttcaaggacggcaaggagctcggcgacctggcgaagttcgtgatcgcgcaggagggcgagagctcccccaagctggcccacctggcccacttcgagaagttcagcacgtacttcaccggcttccacgacaacaggaagaacatgtacagcgacgaggacaagcacacggccatcgcctaccgcctcatccacgagaacctgccccgcttcatcgacaacctgcagatcctgacgaccatcaagcagaagcactccgccctgtacgaccagatcatcaacgagctcaccgcgagcggcctcgacgtgtccctcgccagccacctcgacggctaccacaagctcctgacccaggagggcatcaccgcctacaaccgcatcatcggcgaggtgaacggctacaccaacaagcacaaccagatctgccacaagtccgagaggatcgccaagctcaggcccctgcacaagcagatcctcagcgacggcatgggcgtgagcttcctcccgtccaagttcgccgacgactccgagatgtgccaggccgtgaacgagttctacaggcactacaccgacgtgttcgccaaggtgcagtccctgttcgacggcttcgacgaccaccagaaggacggcatctacgtggagcacaagaacctgaacgagctgtccaagcaggccttcggcgacttcgccctcctgggccgcgtgctggacggctactacgtggacgtcgtgaacccggagttcaacgagcgcttcgcgaaggcgaagacggacaacgcgaaggccaagctcaccaaggagaaggacaagttcatcaagggcgtccacagcctcgcgtccctggagcaggcgatcgagcaccacaccgcgcgccacgacgacgagtccgtgcaggccggcaagctcggccagtacttcaagcacggcctggccggcgtcgacaacccgatccagaagatccacaacaaccactccaccatcaagggcttcctggagagggagcgcccggcgggcgagcgcgcgctccccaagatcaagtccggcaagaaccccgagatgacgcagctcaggcagctgaaggagctgctcgacaacgcgctcaacgtggcgcacttcgccaagctgctcacgaccaagaccacgctggacaaccaggacggcaacttctacggcgagttcggcgtcctgtacgacgagctggcgaagatcccgaccctgtacaacaaggtccgcgactacctgagccagaagcccttctccaccgagaagtacaagctcaacttcggcaacccgaccctcctgaacggctgggacctcaacaaggagaaggacaacttcggcgtgatcctccagaaggacggctgctactacctcgccctgctggacaaggcgcacaagaaggtcttcgacaacgccccgaacaccggcaagaacgtgtaccagaagatggtgtacaagctgctccccggccccaacaagatgctgccgaaggtgttcttcgcgaagtccaacctcgactactacaaccccagcgccgagctcctggacaagtacgccaagggcacgcacaagaagggcgacaacttcaacctcaaggactgccacgcgctgatcgacttcttcaaggcgggcatcaacaagcaccccgagtggcagcacttcggcttcaagttcagcccgacctccagctacagggacctcagcgacttctaccgcgaggtggagccccagggctaccaggtgaagttcgtcgacatcaacgccgactacatcgacgagctcgtcgagcagggcaagctctacctgttccagatctacaacaaggacttctccccgaaggcccacggcaagccgaacctccacacgctctacttcaaggccctcttcagcgaggacaacctggccgacccgatctacaagctcaacggcgaggcgcagatcttctaccgcaaggccagcctggacatgaacgaaacgaccatccacagggccggcgaggtcctggagaacaagaacccggacaacccgaagaagaggcagttcgtctacgacatcatcaaggacaagaggttcacccaggacaagttcatgctccacgtcccgatcaccatgaacttcggcgtccagggcatgaccatcaaggagttcaacaagaaggtcaaccagagcatccagcagtacgacgaggtgaacgtcatcggcatcgaccgcggcgagaggcacctgctctacctgacggtcatcaactccaagggcgagatcctcgagcagcgcagcctgaacgacatcacgaccgcgagcgccaacggcacgcaggtcaccacgccgtaccacaagatcctcgacaagcgcgagatcgagaggctgaacgcgcgcgtcggctggggcgagatcgaaacgatcaaggagctcaagtccggctacctcagccacgtcgtgcaccagatcaaccagctcatgctgaagtacaacgcgatcgtggtcctcgaggacctgaacttcggcttcaagaggggccgcttcaaggtggagaagcagatctaccagaacttcgagaacgccctgatcaagaagctcaaccacctggtcctcaaggacaaggcggacgacgagatcggcagctacaagaacgcgctccagctgaccaacaacttcacggacctcaagtccatcggcaagcagacgggcttcctgttctacgtgccggcgtggaacacctccaagatcgacccggaaaccggcttcgtcgacctgctcaagccgcgctacgagaacatcgcgcagtcccaggcgttcttcggcaagttcgacaagatctgctacaacaccgacaagggctacttcgagttccacatcgactacgcgaagttcaccgacaaggccaagaactccaggcagaagtgggccatctgcagccacggcgacaagcgctacgtgtacgacaagacggcgaaccagaacaagggcgcggccaagggcatcaacgtgaacgacgagctgaagtccctcttcgcgcgctaccacatcaacgacaagcagccgaacctcgtcatggacatctgccagaacaacgacaaggagttccacaagagcctgatgtgcctgctcaagaccctgctcgccctccgctactccaacgcgagctccgacgaggacttcatcctcagccccgtcgcgaacgacgagggcgtgttcttcaactccgccctcgcggacgacacgcagccgcagaacgccgacgcgaacggcgcctaccacatcgccctcaagggcctgtggctgctcaacgagctcaagaactccgacgacctgaacaaggtgaagctcgccattgacaaccagacgtggctgaatttcgctcagaatagggggggcgggggctcaggcgggggcgggagcggcggcgggggctctgggggcggcggcagcggcgggggcggcagcgggggcggcgggtcgccgaagaagaagcgcaaggtgtccggcggcagctccggcggcagcccgaagaagaagcgcaaagtgtgagggacccgatcgttcaaacatttggcaataaagtttcttaagattgaatcctgttgccggtcttgcgatgattatcatataatttctgttgaattacgttaagcatgtaataattaacatgtaatgcatgacgttatttatgagatgggtttttatgattagagtcccgcaattatacatttaatacgcgatagaaaacaaaatatagcgcgcaaactaggataaattatcgcgcgcggtgtcatctatgttactagatcggtaccgaattcattatgtggtctaggtaggttctatatataagaaaacttgaaatgttctaaaaaaaaattcaagcccatgcatgattgaagcaaacggtatagcaacggtgttaacctgatctagtgatctcttgcaatccttaacggccacctaccgcaggtagcaaacggcgtccccctcctcgatatctccgcggcgacctctggctttttccgcggaattgcgcggtggggacggattccacgagaccgcgacgcaaccgcctctcgccgctgggccccacaccgctcggtgccgtagcctcacgggactctttctccctcctcccccgttataaattggcttcatcccctccttgcctcatccatccaaatcccagtccccaatcccatcccttcgtaggagaaattcatcgaagctaagcgaatcctcgcgatcctctcaaggtactgcgagttttcgatccccctctcgacccctcgtatgtttgtgtttgtcgtagcgtttgattaggtatgctttccctgtttgtgttcgtcgtagcgtttgattaggtatgctttccctgttcgtgttcatcgtagtgtttgattaggtcgtgtgaggcgatggcctgctcgcgtccttcgatctgtagtcgatttgcgggtcgtggtgtagatctgcgggctgtgatgaagttatttggtgtgatctgctcgcctgattctgcgggttggctcgagtagatatgatggttggaccggttggttcgtttaccgcgctagggttgggctgggatgatgttgcatgcgccgttgcgcgtgatcccgcagcaggacttgcgtttgattgccagatctcgttacgattatgtgatttggtttggactttttagatctgtagcttctgcttatgtgccagatgcgcctactgctcatatgcctgatgataatcataaatggctgtggaactaactagttgattgcggagtcatgtatcagctacaggtgtagggactagctacaggtgtagggacttgcgtctaattgtttggtcctttactcatgttgcaattatgcaatttagtttagattgtttgttccactcatctaggctgtaaaagggacactgcttagattgctgtttaatctttttagtagattatattatattggtaacttattacccctattacatgccatacgtgacttctgctcatgcctgatgataatcatagatcactgtggaattaattagttgattgttgaatcatgtttcatgtacataccacggcacaattgcttagttccttaacaaatgcaaattttactgatccatgtatgatttgcgtggttctctaatgtgaaatactatagctacttgttagtaagaatcaggttcgtatgcttaatgctgtatgtgccttctgctcatgcctgatgataatcatatatcactggaattaattagttgatcgtttaatcatatatcaagtacataccatgccacaatttttagtcacttaacccatgcagattgaactggtccctgcatgttttgctaaattgttctattctgattagaccatatatcatgtatttttttttggtaatggttctcttattttaaatgctatatagttctggtacttgttagaaagatctgcttcatagtttagttgcctatccctcgaattaggatgctgagcagctgatcctatagctttgtttcatgtatcaattcttttgtgttcaacagtcagtttttgttagattcattgtaacttatggtcgcttactcttctggtcctcaatgcttgcagaagcttgaaattctgatgagtccgtgaggacgaaacgagtaagctcgtcaatttctactgtttgtagatgggaaagaccgaggagaagatctaatttctactgtttgtagatgcaccaaggaaggggaggagatcaatttctactgtttgtagatgtcacagatcacaaacttcaaatgaatttctactgtttgtagatacgcccagaaagcatacgcagtcggccggcatggtcccagcctcctcgctggcgccggctgggcaacatgcttcggcatggcgaatgggacgatcgttcaaacatttggcaataaagtttcttaagattgaatcctgttgccggtcttgcgatgattatcatataatttctgttgaattacgttaagcatgtaataattaacatgtaatgcatgacgttatttatgagatgggtttttatgattagagtcccgcaattatacatttaatacgcgatagaaaacaaaatatagcgcgcaaactaggataaattatcgcgcgcggtgtcatctatgttactagatccctaggctgcagtgcagcgtgacccggtcgtgcccctctctagagataatgagcattgcatgtctaagttataaaaaattaccacatattttttttgtcacacttgtttgaagtgcagtttatctatctttatacatatatttaaactttactctacgaataatataatctatagtactacaataatatcagtgttttagagaatcatataaatgaacagttagacatggtctaaaggacaattgagtattttgacaacaggactctacagttttatctttttagtgtgcatgtgttctcctttttttttgcaaatagcttcacctatataatacttcatccattttattagtacatccatttagggtttagggttaatggtttttatagactaatttttttagtacatctattttattctattttagcctctaaattaagaaaactaaaactctattttagtttttttatttaataatttagatataaaatagaataaaataaagtgactaaaaattaaacaaataccctttaagaaattaaaaaaactaaggaaacatttttcttgtttcgagtagataatgccagcctgttaaacgccgtcgacgagtctaacggacaccaaccagcgaaccagcagcgtcgcgtcgggccaagcgaagcagacggcacggcatctctgtcgctgcctctggacccctctcgagagttccgctccaccgttggacttgctccgctgtcggcatccagaaattgcgtggcggagcggcagacgtgagccggcacggcaggcggcctcctcctcctctcacggcaccggcagctacgggggattcctttcccaccgctccttcgctttcccttcctcgcccgccgtaataaatagacaccccctccacaccctctttccccaacctcgtgttgttcggagcgcacacacacacaaccagatctcccccaaatccacccgtcggcacctccgcttcaaggtacgccgctcgtcctccccccccccccctctctaccttctctagatcggcgttccggtccatggttagggcccggtagttctacttctgttcatgtttgtgttagatccgtgtttgtgttagatccgtgctgctagcgttcgtacacggatgcgacctgtacgtcagacacgttctgattgctaacttgccagtgtttctctttggggaatcctgggatggctctagccgttccgcagacgggatcgatttcatgattttttttgtttcgttgcatagggtttggtttgcccttttcctttatttcaatatatgccgtgcacttgtttgtcgggtcatcttttcatgcttttttttgtcttggttgtgatgatgtggtctggttgggcggtcgttctagatcggagtagaattctgtttcaaactacctggtggatttattaattttggatctgtatgtgtgtgccatacatattcatagttacgaattgaagatgatggatggaaatatcgatctaggataggtatacatgttgatgcgggttttactgatgcatatacagagatgctttttgttcgcttggttgtgatgatgtggtgtggttgggcggtcgttcattcgttctagatcggagtagaatactgtttcaaactacctggtgtatttattaattttggaactgtatgtgtgtgtcatacatcttcatagttacgagtttaagatggatggaaatatcgatctaggataggtatacatgttgatgtgggttttactgatgcatatacatgatggcatatgcagcatctattcatatgctctaaccttgagtacctatctattataataaacaagtatgttttataattattttgatcttgatatacttggatgatggcatatgcagcagctatatgtggatttttttagccctgccttcatacgctatttatttgcttggtactgtttcttttgtcgatgctcaccctgttgtttggtgttacttctgcagggatcaccgatcatgcaaaaactcattaactcagtgcaaaactatgcctggggcagcaaaacggcgttgactgaactttatggtatggaaaatccgtccagccagccgatggccgagctgtggatgggcgcacatccgaaaagcagttcacgagtgcagaatgccgccggagatatcgtttcactgcgtgatgtgattgagagtgataaatcgactctgctcggagaggccgttgccaaacgctttggcgaactgcctttcctgttcaaagtattatgcgcagcacagccactctccattcaggttcatccaaacaaacacaattctgaaatcggttttgccaaagaaaatgccgcaggtatcccgatggatgccgccgagcgtaactataaagatcctaaccacaagccggagctggtttttgcgctgacgcctttccttgcgatgaacgcgtttcgtgaattttccgagattgtctccctactccagccggtcgcaggtgcacatccggcgattgctcactttttacaacagcctgatgccgaacgtttaagcgaactgttcgccagcctgttgaatatgcagggtgaagaaaaatcccgcgcgctggcgattttaaaatcggccctcgatagccagcagggtgaaccgtggcaaacgattcgtttaatttctgaattttacccggaagacagcggtctgttctccccgctattgctgaatgtggtgaaattgaaccctggcgaagcgatgttcctgttcgctgaaacaccgcacgcttacctgcaaggcgtggcgctggaagtgatggcaaactccgataacgtgctgcgtgcgggtctgacgcctaaatacattgatattccggaactggttgccaatgtgaaattcgaagccaaaccggctaaccagttgttgacccagccggtgaaacaaggtgcagaactggacttcccgattccagtggatgattttgccttctcgctgcatgaccttagtgataaagaaaccaccattagccagcagagtgccgccattttgttctgcgtcgaaggcgatgcaacgttgtggaaaggttctcagcagttacagcttaaaccgggtgaatcagcgtttattgccgccaacgaatcaccggtgactgtcaaaggccacggccgtttagcgcgtgtttacaacaagctgtaagagcttactgaaaaaattaacatctcttgctaagctgggagctcgatccgtcgacctgcagatcgttcaaacatttggcaataaagtttcttaagattgaatcctgttgccggtcttgcgatgattatcatataatttctgttgaattacgttaagcatgtaataattaacatgtaatgcatgacgttatttatgagatgggtttttatgattagagtcccgcaattatacatttaatacgcgatagaaaacaaaatatagcgcgcaaactaggataaattatcgcgcgcggtgtcatctatgttactagatccggaccgcctgcaggcccgggggcgcgccctaattagctaacggccaggatcgccgcgtgagcctttagcaactagctagattaattaacgcaatctgttattaagttgtctaagcgtcaatttgtttacaccacaatatatcctgccaccagccagccaacagctccccgaccggcagctcggcacaaaatcaccactcgatacaggcagcccatcagaattaattctcatgtttgacagcttatcatcgactgcacggtgcaccaatgcttctggcgtcaggcagccatcggaagctgtggtatggctgtgcaggtcgtaaatcactgcataattcgtgtcgctcaaggcgcactcccgttctggataatgttttttgcgccgacatcataacggttctggcaaatattctgaaatgagctgttgacaattaatcatccggctcgtataatgtgtggaattgtgagcggataacaatttcacacaggaaacagaccatgagggaagcgttgatcgccgaagtatcgactcaactatcagaggtagttggcgtcatcgagcgccatctcgaaccgacgttgctggccgtacatttgtacggctccgcagtggatggcggcctgaagccacacagtgatattgatttgctggttacggtgaccgtaaggcttgatgaaacaacgcggcgagctttgatcaacgaccttttggaaacttcggcttcccctggagagagcgagattctccgcgctgtagaagtcaccattgttgtgcacgacgacatcattccgtggcgttatccagctaagcgcgaactgcaatttggagaatggcagcgcaatgacattcttgcaggtatcttcgagccagccacgatcgacattgatctggctatcttgctgacaaaagcaagagaacatagcgttgccttggtaggtccagcggcggaggaactctttgatccggttcctgaacaggatctatttgaggcgctaaatgaaaccttaacgctatggaactcgccgcccgactgggctggcgatgagcgaaatgtagtgcttacgttgtcccgcatttggtacagcgcagtaaccggcaaaatcgcgccgaaggatgtcgctgccgactgggcaatggagcgcctgccggcccagtatcagcccgtcatacttgaagctaggcaggcttatcttggacaagaagatcgcttggcctcgcgcgcagatcagttggaagaatttgttcactacgtgaaaggcgagatcaccaaagtagtcggcaaataaagctctagtggatctccgtacccagggatctggctcgcggcggacgcacgacgccggggcgagaccataggcgatctcctaaatcaatagtagctgtaacctcgaagcgtttcacttgtaacaacgattgagaatttttgtcataaaattgaaatacttggttcgcatttttgtcatccgcggtcagccgcaattctgacgaactgcccatttagctggagatgattgtacatccttcacgtgaaaatttctcaagcgctgtgaacaagggttcagattttagattgaaaggtgagccgttgaaacacgttcttcttgtcgatgacgacgtcgctatgcggcatcttattattgaataccttacgatccacgccttcaaagtgaccgcggtagccgacagcacccagttcacaagagtactctcttccgcgacggtcgatgtcgtggttgttgatctagatttaggtcgtgaagatgggctcgagatcgttcgtaatctggcggcaaagtctgatattccaatcataattatcagtggcgaccgccttgaggagacggataaagttgttgcactcgagctaggagcaagtgattttatcgctaagccgttcagtatcagagagtttctagcacgcattcgggttgccttgcgcgtgcgccccaacgttgtccgctccaaagaccgacggtctttttgttttactgactggacacttaatctcaggcaacgtcgcttgatgtccgaagctggcggtgaggtgaaacttacggcaggtgagttcaatcttctcctcgcgtttttagagaaaccccgcgacgttctatcgcgcgagcaacttctcattgccagtcgagtacgcgacgaggaggtttatgacaggagtatagatgttctcattttgaggctgcgccgcaaacttgaggcagatccgtcaagccctcaactgataaaaacagcaagaggtgccggttatttctttgacgcggacgtgcaggtttcgcacggggggacgatggcagcctgagccaattcccagatccccgaggaatcggcgtgagcggtcgcaaaccatccggcccggtacaaatcggcgcggcgctgggtgatgacctggtggagaagttgaaggccgcgcaggccgcccagcggcaacgcatcgaggcagaagcacgccccggtgaatcgtggcaagcggccgctgatcgaatccgcaaagaatcccggcaaccgccggcagccggtgcgccgtcgattaggaagccgcccaagggcgacgagcaaccagattttttcgttccgatgctctatgacgtgggcacccgcgatagtcgcagcatcatggacgtggccgttttccgtctgtcgaagcgtgaccgacgagctggcgaggtgatccgctacgagcttccagacgggcacgtagaggtttccgcagggccggccggcatggccagtgtgtgggattacgacctggtactgatggcggtttcccatctaaccgaatccatgaaccgataccgggaagggaagggagacaagcccggccgcgtgttccgtccacacgttgcggacgtactcaagttctgccggcgagccgatggcggaaagcagaaagacgacctggtagaaacctgcattcggttaaacaccacgcacgttgccatgcagcgtacgaagaaggccaagaacggccgcctggtgacggtatccgagggtgaagccttgattagccgctacaagatcgtaaagagcgaaaccgggcggccggagtacatcgagatcgagctggctgattggatgtaccgcgagatcacagaaggcaagaacccggacgtgctgacggttcaccccgattactttttgatcgatcccggcatcggccgttttctctaccgcctggcacgccgcgccgcaggcaaggcagaagccagatggttgttcaagacgatctacgaacgcagtggcagcgccggagagttcaagaagttctgtttcaccgtgcgcaagctgatcgggtcaaatgacctgccggagtacgatttgaaggaggaggcggggcaggctggcccgatcctagtcatgcgctaccgcaacctgatcgagggcgaagcatccgccggttcctaatgtacggagcagatgctagggcaaattgccctagcaggggaaaaaggtcgaaaaggtctctttcctgtggatagcacgtacattgggaacccaaagccgtacattgggaaccggaacccgtacattgggaacccaaagccgtacattgggaaccggtcacacatgtaagtgactgatataaaagagaaaaaaggcgatttttccgcctaaaactctttaaaacttattaaaactcttaaaacccgcctggcctgtgcataactgtctggccagcgcacagccgaagagctgcaaaaagcgcctacccttcggtcgctgcgctccctacgccccgccgcttcgcgtcggcctatcgcggccgctggccgctcaaaaatggctggcctacggccaggcaatctaccagggcgcggacaagccgcgccgtcgccactcgaccgccggcgctgaggtctgcctcgtgaagaaggtgttgctgactcataccaggcctgaatcgccccatcatccagccagaaagtgagggagccacggttgatgagagctttgttgtaggtggaccagttggtgattttgaacttttgctttgccacggaacggtctgcgttgtcgggaagatgcgtgatctgatccttcaactcagcaaaagttcgatttattcaacaaagccgccgtcccgtcaagtcagcgtaatgctctgccagtgttacaaccaattaaccaattctgattagaaaaactcatcgagcatcaaatgaaactgcaatttattcatatcaggattatcaataccatatttttgaaaaagccgtttctgtaatgaaggagaaaactcaccgaggcagttccataggatggcaagatcctggtatcggtctgcgattccgactcgtccaacatcaatacaacctattaatttcccctcgtcaaaaataaggttatcaagtgagaaatcaccatgagtgacgactgaatccggtgagaatggcaaaagctctgcattaatgaatcggccaacgcgcggggagaggcggtttgcgtattgggcgctcttccgcttcctcgctcactgactcgctgcgctcggtcgttcggctgcggcgagcggtatcagctcactcaaaggcggtaatacggttatccacagaatcaggggataacgcaggaaagaacatgtgagcaaaaggccagcaaaaggccaggaaccgtaaaaaggccgcgttgctggcgtttttccataggctccgcccccctgacgagcatcacaaaaatcgacgctcaagtcagaggtggcgaaacccgacaggactataaagataccaggcgtttccccctggaagctccctcgtgcgctctcctgttccgaccctgccgcttaccggatacctgtccgcctttctcccttcgggaagcgtggcgctttctcatagctcacgctgtaggtatctcagttcggtgtaggtcgttcgctccaagctgggctgtgtgcacgaaccccccgttcagcccgaccgctgcgccttatccggtaactatcgtcttgagtccaacccggtaagacacgacttatcgccactggcagcagccactggtaacaggattagcagagcgaggtatgtaggcggtgctacagagttcttgaagtggtggcctaactacggctacactagaagaacagtatttggtatctgcgctctgctgaagccagttaccttcggaaaaagagttggtagctcttgatccggcaaacaaaccaccgctggtagcggtggtttttttgtttgcaagcagcagattacgcgcagaaaaaaaggatctcaagaagatcctttgatcttttctacggggtctgacgctcagtggaacgaaaactcacgttaagggattttggtcatgagattatcaaaaaggatcttcacctagatccttttgatccggaatta

SEQ ID NO: 84 - DNA, 17531 bp, synthetic construct
  source 1..17531: mol_type = other DNA
attcctgtggttggcatgcacatacaaatggacgaacggataaaccttttcacgcccttttaaatatccgattattctaataaacgctcttttctcttaggtttacccgccaatatatcctgtcaaacactgatagtttaaactggcactagcctaacggtgttgactaactaggccgcttccctaattagctaacccgggggcgcgccgggaccggaattcattatgtggtctaggtaggttctatatataagaaaacttgaaatgttctaaaaaaaaattcaagcccatgcatgattgaagcaaacggtatagcaacggtgttaacctgatctagtgatctcttgcaatccttaacggccacctaccgcaggtagcaaacggcgtccccctcctcgatatctccgcggcgacctctggctttttccgcggaattgcgcggtggggacggattccacgagaccgcgacgcaaccgcctctcgccgctgggccccacaccgctcggtgccgtagcctcacgggactctttctccctcctcccccgttataaattggcttcatcccctccttgcctcatccatccaaatcccagtccccaatcccatcccttcgtaggagaaattcatcgaagctaagcgaatcctcgcgatcctctcaaggtactgcgagttttcgatccccctctcgacccctcgtatgtttgtgtttgtcgtagcgtttgattaggtatgctttccctgtttgtgttcgtcgtagcgtttgattaggtatgctttccctgttcgtgttcatcgtagtgtttgattaggtcgtgtgaggcgatggcctgctcgcgtccttcgatctgtagtcgatttgcgggtcgtggtgtagatctgcgggctgtgatgaagttatttggtgtgatctgctcgcctgattctgcgggttggctcgagtagatatgatggttggaccggttggttcgtttaccgcgctagggttgggctgggatgatgttgcatgcgccgttgcgcgtgatcccgcagcaggacttgcgtttgattgccagatctcgttacgattatgtgatttggtttggactttttagatctgtagcttctgcttatgtgccagatgcgcctactgctcatatgcctgatgataatcataaatggctgtggaactaactagttgattgcggagtcatgtatcagctacaggtgtagggactagctacaggtgtagggacttgcgtctaattgtttggtcctttactcatgttgcaattatgcaatttagtttagattgtttgttccactcatctaggctgtaaaagggacactgcttagattgctgtttaatctttttagtagattatattatattggtaacttattacccctattacatgccatacgtgacttctgctcatgcctgatgataatcatagatcactgtggaattaattagttgattgttgaatcatgtttcatgtacataccacggcacaattgcttagttccttaacaaatgcaaattttactgatccatgtatgatttgcgtggttctctaatgtgaaatactatagctacttgttagtaagaatcaggttcgtatgcttaatgctgtatgtgccttctgctcatgcctgatgataatcatatatcactggaattaattagttgatcgtttaatcatatatcaagtacataccatgccacaatttttagtcacttaacccatgcagattgaactggtccctgcatgttttgctaaattgttctattctgattagaccatatatcatgtatttttttttggtaatggttctcttattttaaatgctatatagttctggtacttgttagaaagatctgcttcatagtttagttgcctatccctcgaattaggatgctgagcagctgatcctatagctttgtttcatgtatcaattcttttgtgttcaacagtcagtttttgttagattcattgtaacttatggtcgcttactcttctggtcctcaatgcttgcagggatcccctaaatagaccatgccgaagaagaagcgcaaggtcgggggcgggggctcaggcgggggcgggagcggcggcgggggctctgggggcggcggcagcggcgggggcggcagcgggggcggcgggtcgatgctgttccaggatttcactcatctgtaccctctctcaaagactgttcggttcgagctcaagcctattgggcggactctggagcacatccacgcgaagaacttcctcagccaggacgaaaccatggccgacatgtaccagaaggtcaaggtcatcctcgacgactaccacagggacttcatcgcggacatgatgggcgaggtgaagctgacgaagctcgccgagttctacgacgtctacctcaagttccgcaagaacccgaaggacgacggcctccagaagcagctcaaggacctgcaggccgtcctgaggaaggagtccgtcaagcccatcggcagcggcggcaagtacaagaccggctacgacaggctgttcggcgccaagctgttcaaggacggcaaggagctcggcgacctggcgaagttcgtgatcgcgcaggagggcgagagctcccccaagctggcccacctggcccacttcgagaagttcagcacgtacttcaccggcttccacgacaacaggaagaacatgtacagcgacgaggacaagcacacggccatcgcctaccgcctcatccacgagaacctgccccgcttcatcgacaacctgcagatcctgacgaccatcaagcagaagcactccgccctgtacgaccagatcatcaacgagctcaccgcgagcggcctcgacgtgtccctcgccagccacctcgacggctaccacaagctcctgacccaggagggcatcaccgcctacaaccgcatcatcggcgaggtgaacggctacaccaacaagcacaaccagatctgccacaagtccgagaggatcgccaagctcaggcccctgcacaagcagatcctcagcgacggcatgggcgtgagcttcctcccgtccaagttcgccgacgactccgagatgtgccaggccgtgaacgagttctacaggcactacaccgacgtgttcgccaaggtgcagtccctgttcgacggcttcgacgaccaccagaaggacggcatctacgtggagcacaagaacctgaacgagctgtccaagcaggccttcggcgacttcgccctcctgggccgcgtgctggacggctactacgtggacgtcgtgaacccggagttcaacgagcgcttcgcgaaggcgaagacggacaacgcgaaggccaagctcaccaaggagaaggacaagttcatcaagggcgtccacagcctcgcgtccctggagcaggcgatcgagcaccacaccgcgcgccacgacgacgagtccgtgcaggccggcaagctcggccagtacttcaagcacggcctggccggcgtcgacaacccgatccagaagatccacaacaaccactccaccatcaagggcttcctggagagggagcgcccggcgggcgagcgcgcgctccccaagatcaagtccggcaagaaccccgagatgacgcagctcaggcagctgaaggagctgctcgacaacgcgctcaacgtggcgcacttcgccaagctgctcacgaccaagaccacgctggacaaccaggacggcaacttctacggcgagttcggcgtcctgtacgacgagctggcgaagatcccgaccctgtacaacaaggtccgcgactacctgagccagaagcccttctccaccgagaagtacaagctcaacttcggcaacccgaccctcctgaacggctgggacctcaacaaggagaaggacaacttcggcgtgatcctccagaaggacggctgctactacctcgccctgctggacaaggcgcacaagaaggtcttcgacaacgccccgaacaccggcaagaacgtgtaccagaagatggtgtacaagctgctccccggccccaacaagatgctgccgaaggtgttcttcgcgaagtccaacctcgactactacaaccccagcgccgagctcctggacaagtacgccaagggcacgcacaagaagggcgacaacttcaacctcaaggactgccacgcgctgatcgacttcttcaaggcgggcatcaacaagcaccccgagtggcagcacttcggcttcaagttcagcccgacctccagctacagggacctcagcgacttctaccgcgaggtggagccccagggctaccaggtgaagttcgtcgacatcaacgccgactacatcgacgagctcgtcgagcagggcaagctctacctgttccagatctacaacaaggacttctccccgaaggcccacggcaagccgaacctccacacgctctacttcaaggccctcttcagcgaggacaacctggccgacccgatctacaagctcaacggcgaggcgcagatcttctaccgcaaggccagcctggacatgaacgaaacgaccatccacagggccggcgaggtcctggagaacaagaacccggacaacccgaagaagaggcagttcgtctacgacatcatcaaggacaagaggtacacccaggacaagttcatgctccacgtcccgatcaccatgaacttcggcgtccagggcatgaccatcaaggagttcaacaagaaggtcaaccagagcatccagcagtacgacgaggtgaacgtcatcggcatcgaccgcggcgagaggcacctgctctacctgacggtcatcaactccaagggcgagatcctcgagcagcgcagcctgaacgacatcacgaccgcgagcgccaacggcacgcaggtcaccacgccgtaccacaagatcctcgacaagcgcgagatcgagaggctgaacgcgcgcgtcggctggggcgagatcgaaacgatcaaggagctcaagtccggctacctcagccaggtcgtgcaccagatcaaccagctcatgctgaagtacaacgcgatcgtggtcctcgaggacctgaacttcggcttcaagaggggccgcttcaaggtggagaagcagatctaccagaacttcgagaacgccctgatcaagaagctcaaccacctggtcctcaaggacaaggcggacgacgagatcggcagctacaagaacgcgctccagctgaccaacaacttcacggacctcaagtccatcggcaagcagacgggcttcctgttctacgtgccggcgtggaacacctccaagatcgacccggaaaccggcttcgtcgacctgctcaagccgcgctacgagaacatcgcgcagtcccaggcgttcttcggcaagttcgacaagatctgctacaacaccgacaagggctacttcgagttccacatcgactacgcgaagttcaccgacaaggccaagaactccaggcagaagtgggccatctgcagccacggcgacaagcgctacgtgtacgacaagacggcgaaccagaacaagggcgcggccaagggcatcaacgtgaacgacgagctgaagtccctcttcgcgcgctaccacatcaacgacaagcagccgaacctcgtcatggacatctgccagaacaacgacaaggagttccacaagagcctgatgtgcctgctcaagaccctgctcgccctccgctactccaacgcgagctccgacgaggacttcatcctcagccccgtcgcgaacgacgagggcgtgttcttcaactccgccctcgcggacgacacgcagccgcagaacgccgacgcgaacggcgcctaccacatcgccctcaagggcctgtggctgctcaacgagctcaagaactccgacgacctgaacaaggtgaagctcgccattgacaaccagacgtggctgaatttcgctcagaatagggggggcgggggctcaggcgggggcgggagcggcggcgggggctctgggggcggcggcagcggcgggggcggcagcgggggcggcgggtcgccgaagaagaagcgcaaggtgtccggcggcagctccggcggcagcccgaagaagaagcgcaaagtgtgagggacccgatcgttcaaacatttggcaataaagtttcttaagattgaatcctgttgccggtcttgcgatgattatcatataatttctgttgaattacgttaagcatgtaataattaacatgtaatgcatgacgttatttatgagatgggtttttatgattagagtcccgcaattatacatttaatacgcgatagaaaacaaaatatagcgcgcaaactaggataaattatcgcgcgcggtgtcatctatgttactagatcggtaccgaattcattatgtggtctaggtaggttctatatataagaaaacttgaaatgttctaaaaaaaaattcaagcccatgcatgattgaagcaaacggtatagcaacggtgttaacctgatctagtgatctcttgcaatccttaacggccacctaccgcaggtagcaaacggcgtccccctcctcgatatctccgcggcgacctctggctttttccgcggaattgcgcggtggggacggattccacgagaccgcgacgcaaccgcctctcgccgctgggccccacaccgctcggtgccgtagcctcacgggactctttctccctcctcccccgttataaattggcttcatcccctccttgcctcatccatccaaatcccagtccccaatcccatcccttcgtaggagaaattcatcgaagctaagcgaatcctcgcgatcctctcaaggtactgcgagttttcgatccccctctcgacccctcgtatgtttgtgtttgtcgtagcgtttgattaggtatgctttccctgtttgtgttcgtcgtagcgtttgattaggtatgctttccctgttcgtgttcatcgtagtgtttgattaggtcgtgtgaggcgatggcctgctcgcgtccttcgatctgtagtcgatttgcgggtcgtggtgtagatctgcgggctgtgatgaagttatttggtgtgatctgctcgcctgattctgcgggttggctcgagtagatatgatggttggaccggttggttcgtttaccgcgctagggttgggctgggatgatgttgcatgcgccgttgcgcgtgatcccgcagcaggacttgcgtttgattgccagatctcgttacgattatgtgatttggtttggactttttagatctgtagcttctgcttatgtgccagatgcgcctactgctcatatgcctgatgataatcataaatggctgtggaactaactagttgattgcggagtcatgtatcagctacaggtgtagggactagctacaggtgtagggacttgcgtctaattgtttggtcctttactcatgttgcaattatgcaatttagtttagattgtttgttccactcatctaggctgtaaaagggacactgcttagattgctgtttaatctttttagtagattatattatattggtaacttattacccctattacatgccatacgtgacttctgctcatgcctgatgataatcatagatcactgtggaattaattagttgattgttgaatcatgtttcatgtacataccacggcacaattgcttagttccttaacaaatgcaaattttactgatccatgtatgatttgcgtggttctctaatgtgaaatactatagctacttgttagtaagaatcaggttcgtatgcttaatgctgtatgtgccttctgctcatgcctgatgataatcatatatcactggaattaattagttgatcgtttaatcatatatcaagtacataccatgccacaatttttagtcacttaacccatgcagattgaactggtccctgcatgttttgctaaattgttctattctgattagaccatatatcatgtatttttttttggtaatggttctcttattttaaatgctatatagttctggtacttgttagaaagatctgcttcatagtttagttgcctatccctcgaattaggatgctgagcagctgatcctatagctttgtttcatgtatcaattcttttgtgttcaacagtcagtttttgttagattcattgtaacttatggtcgcttactcttctggtcctcaatgcttgcagaagcttgaaattctgatgagtccgtgaggacgaaacgagtaagctcgtcaatttctactgtttgtagatgggaaagaccgaggagaagatctaatttctactgtttgtagatgcaccaaggaaggggaggagatcaatttctactgtttgtagatgtcacagatcacaaacttcaaatgaatttctactgtttgtagatacgcccagaaagcatacgcagtcggccggcatggtcccagcctcctcgctggcgccggctgggcaacatgcttcggcatggcgaatgggacgatcgttcaaacatttggcaataaagtttcttaagattgaatcctgttgccggtcttgcgatgattatcatataatttctgttgaattacgttaagcatgtaataattaacatgtaatgcatgacgttatttatgagatgggtttttatgattagagtcccgcaattatacatttaatacgcgatagaaaacaaaatatagcgcgcaaactaggataaattatcgcgcgcggtgtcatctatgttactagatccctaggctgcagtgcagcgtgacccggtcgtgcccctctctagagataatgagcattgcatgtctaagttataaaaaattaccacatattttttttgtcacacttgtttgaagtgcagtttatctatctttatacatatatttaaactttactctacgaataatataatctatagtactacaataatatcagtgttttagagaatcatataaatgaacagttagacatggtctaaaggacaattgagtattttgacaacaggactctacagttttatctttttagtgtgcatgtgttctcctttttttttgcaaatagcttcacctatataatacttcatccattttattagtacatccatttagggtttagggttaatggtttttatagactaatttttttagtacatctattttattctattttagcctctaaattaagaaaactaaaactctattttagtttttttatttaataatttagatataaaatagaataaaataaagtgactaaaaattaaacaaataccctttaagaaattaaaaaaactaaggaaacatttttcttgtttcgagtagataatgccagcctgttaaacgccgtcgacgagtctaacggacaccaaccagcgaaccagcagcgtcgcgtcgggccaagcgaagcagacggcacggcatctctgtcgctgcctctggacccctctcgagagttccgctccaccgttggacttgctccgctgtcggcatccagaaattgcgtggcggagcggcagacgtgagccggcacggcaggcggcctcctcctcctctcacggcaccggcagctacgggggattcctttcccaccgctccttcgctttcccttcctcgcccgccgtaataaatagacaccccctccacaccctctttccccaacctcgtgttgttcggagcgcacacacacacaaccagatctcccccaaatccacccgtcggcacctccgcttcaaggtacgccgctcgtcctccccccccccccctctctaccttctctagatcggcgttccggtccatggttagggcccggtagttctacttctgttcatgtttgtgttagatccgtgtttgtgttagatccgtgctgctagcgttcgtacacggatgcgacctgtacgtcagacacgttctgattgctaacttgccagtgtttctctttggggaatcctgggatggctctagccgttccgcagacgggatcgatttcatgattttttttgtttcgttgcatagggtttggtttgcccttttcctttatttcaatatatgccgtgcacttgtttgtcgggtcatcttttcatgcttttttttgtcttggttgtgatgatgtggtctggttgggcggtcgttctagatcggagtagaattctgtttcaaactacctggtggatttattaattttggatctgtatgtgtgtgccatacatattcatagttacgaattgaagatgatggatggaaatatcgatctaggataggtatacatgttgatgcgggttttactgatgcatatacagagatgctttttgttcgcttggttgtgatgatgtggtgtggttgggcggtcgttcattcgttctagatcggagtagaatactgtttcaaactacctggtgtatttattaattttggaactgtatgtgtgtgtcatacatcttcatagttacgagtttaagatggatggaaatatcgatctaggataggtatacatgttgatgtgggttttactgatgcatatacatgatggcatatgcagcatctattcatatgctctaaccttgagtacctatctattataataaacaagtatgttttataattattttgatcttgatatacttggatgatggcatatgcagcagctatatgtggatttttttagccctgccttcatacgctatttatttgcttggtactgtttcttttgtcgatgctcaccctgttgtttggtgttacttctgcagggatcaccgatcatgcaaaaactcattaactcagtgcaaaactatgcctggggcagcaaaacggcgttgactgaactttatggtatggaaaatccgtccagccagccgatggccgagctgtggatgggcgcacatccgaaaagcagttcacgagtgcagaatgccgccggagatatcgtttcactgcgtgatgtgattgagagtgataaatcgactctgctcggagaggccgttgccaaacgctttggcgaactgcctttcctgttcaaagtattatgcgcagcacagccactctccattcaggttcatccaaacaaacacaattctgaaatcggttttgccaaagaaaatgccgcaggtatcccgatggatgccgccgagcgtaactataaagatcctaaccacaagccggagctggtttttgcgctgacgcctttccttgcgatgaacgcgtttcgtgaattttccgagattgtctccctactccagccggtcgcaggtgcacatccggcgattgctcactttttacaacagcctgatgccgaacgtttaagcgaactgttcgccagcctgttgaatatgcagggtgaagaaaaatcccgcgcgctggcgattttaaaatcggccctcgatagccagcagggtgaaccgtggcaaacgattcgtttaatttctgaattttacccggaagacagcggtctgttctccccgctattgctgaatgtggtgaaattgaaccctggcgaagcgatgttcctgttcgctgaaacaccgcacgcttacctgcaaggcgtggcgctggaagtgatggcaaactccgataacgtgctgcgtgcgggtctgacgcctaaatacattgatattccggaactggttgccaatgtgaaattcgaagccaaaccggctaaccagttgttgacccagccggtgaaacaaggtgcagaactggacttcccgattccagtggatgattttgccttctcgctgcatgaccttagtgataaagaaaccaccattagccagcagagtgccgccattttgttctgcgtcgaaggcgatgcaacgttgtggaaaggttctcagcagttacagcttaaaccgggtgaatcagcgtttattgccgccaacgaatcaccggtgactgtcaaaggccacggccgtttagcgcgtgtttacaacaagctgtaagagcttactgaaaaaattaacatctcttgctaagctgggagctcgatccgtcgacctgcagatcgttcaaacatttggcaataaagtttcttaagattgaatcctgttgccggtcttgcgatgattatcatataatttctgttgaattacgttaagcatgtaataattaacatgtaatgcatgacgttatttatgagatgggtttttatgattagagtcccgcaattatacatttaatacgcgatagaaaacaaaatatagcgcgcaaactaggataaattatcgcgcgcggtgtcatctatgttactagatccggaccgcctgcaggcccgggggcgcgccctaattagctaacggccaggatcgccgcgtgagcctttagcaactagctagattaattaacgcaatctgttattaagttgtctaagcgtcaatttgtttacaccacaatatatcctgccaccagccagccaacagctccccgaccggcagctcggcacaaaatcaccactcgatacaggcagcccatcagaattaattctcatgtttgacagcttatcatcgactgcacggtgcaccaatgcttctggcgtcaggcagccatcggaagctgtggtatggctgtgcaggtcgtaaatcactgcataattcgtgtcgctcaaggcgcactcccgttctggataatgttttttgcgccgacatcataacggttctggcaaatattctgaaatgagctgttgacaattaatcatccggctcgtataatgtgtggaattgtgagcggataacaatttcacacaggaaacagaccatgagggaagcgttgatcgccgaagtatcgactcaactatcagaggtagttggcgtcatcgagcgccatctcgaaccgacgttgctggccgtacatttgtacggctccgcagtggatggcggcctgaagccacacagtgatattgatttgctggttacggtgaccgtaaggcttgatgaaacaacgcggcgagctttgatcaacgaccttttggaaacttcggcttcccctggagagagcgagattctccgcgctgtagaagtcaccattgttgtgcacgacgacatcattccgtggcgttatccagctaagcgcgaactgcaatttggagaatggcagcgcaatgacattcttgcaggtatcttcgagccagccacgatcgacattgatctggctatcttgctgacaaaagcaagagaacatagcgttgccttggtaggtccagcggcggaggaactctttgatccggttcctgaacaggatctatttgaggcgctaaatgaaaccttaacgctatggaactcgccgcccgactgggctggcgatgagcgaaatgtagtgcttacgttgtcccgcatttggtacagcgcagtaaccggcaaaatcgcgccgaaggatgtcgctgccgactgggcaatggagcgcctgccggcccagtatcagcccgtcatacttgaagctaggcaggcttatcttggacaagaagatcgcttggcctcgcgcgcagatcagttggaagaatttgttcactacgtgaaaggcgagatcaccaaagtagtcggcaaataaagctctagtggatctccgtacccagggatctggctcgcggcggacgcacgacgccggggcgagaccataggcgatctcctaaatcaatagtagctgtaacctcgaagcgtttcacttgtaacaacgattgagaatttttgtcataaaattgaaatacttggttcgcatttttgtcatccgcggtcagccgcaattctgacgaactgcccatttagctggagatgattgtacatccttcacgtgaaaatttctcaagcgctgtgaacaagggttcagattttagattgaaaggtgagccgttgaaacacgttcttcttgtcgatgacgacgtcgctatgcggcatcttattattgaataccttacgatccacgccttcaaagtgaccgcggtagccgacagcacccagttcacaagagtactctcttccgcgacggtcgatgtcgtggttgttgatctagatttaggtcgtgaagatgggctcgagatcgttcgtaatctggcggcaaagtctgatattccaatcataattatcagtggcgaccgccttgaggagacggataaagttgttgcactcgagctaggagcaagtgattttatcgctaagccgttcagtatcagagagtttctagcacgcattcgggttgccttgcgcgtgcgccccaacgttgtccgctccaaagaccgacggtctttttgttttactgactggacacttaatctcaggcaacgtcgcttgatgtccgaagctggcggtgaggtgaaacttacggcaggtgagttcaatcttctcctcgcgtttttagagaaaccccgcgacgttctatcgcgcgagcaacttctcattgccagtcgagtacgcgacgaggaggtttatgacaggagtatagatgttctcattttgaggctgcgccgcaaacttgaggcagatccgtcaagccctcaactgataaaaacagcaagaggtgccggttatttctttgacgcggacgtgcaggtttcgcacggggggacgatggcagcctgagccaattcccagatccccgaggaatcggcgtgagcggtcgcaaaccatccggcccggtacaaatcggcgcggcgctgggtgatgacctggtggagaagttgaaggccgcgcaggccgcccagcggcaacgcatcgaggcagaagcacgccccggtgaatcgtggcaagcggccgctgatcgaatccgcaaagaatcccggcaaccgccggcagccggtgcgccgtcgattaggaagccgcccaagggcgacgagcaaccagattttttcgttccgatgctctatgacgtgggcacccgcgatagtcgcagcatcatggacgtggccgttttccgtctgtcgaagcgtgaccgacgagctggcgaggtgatccgctacgagcttccagacgggcacgtagaggtttccgcagggccggccggcatggccagtgtgtgggattacgacctggtactgatggcggtttcccatctaaccgaatccatgaaccgataccgggaagggaagggagacaagcccggccgcgtgttccgtccacacgttgcggacgtactcaagttctgccggcgagccgatggcggaaagcagaaagacgacctggtagaaacctgcattcggttaaacaccacgcacgttgccatgcagcgtacgaagaaggccaagaacggccgcctggtgacggtatccgagggtgaagccttgattagccgctacaagatcgtaaagagcgaaaccgggcggccggagtacatcgagatcgagctggctgattggatgtaccgcgagatcacagaaggcaagaacccggacgtgctgacggttcaccccgattactttttgatcgatcccggcatcggccgttttctctaccgcctggcacgccgcgccgcaggcaaggcagaagccagatggttgttcaagacgatctacgaacgcagtggcagcgccggagagttcaagaagttctgtttcaccgtgcgcaagctgatcgggtcaaatgacctgccggagtacgatttgaaggaggaggcggggcaggctggcccgatcctagtcatgcgctaccgcaacctgatcgagggcgaagcatccgccggttcctaatgtacggagcagatgctagggcaaattgccctagcaggggaaaaaggtcgaaaaggtctctttcctgtggatagcacgtacattgggaacccaaagccgtacattgggaaccggaacccgtacattgggaacccaaagccgtacattgggaaccggtcacacatgtaagtgactgatataaaagagaaaaaaggcgatttttccgcctaaaactctttaaaacttattaaaactcttaaaacccgcctggcctgtgcataactgtctggccagcgcacagccgaagagctgcaaaaagcgcctacccttcggtcgctgcgctccctacgccccgccgcttcgcgtcggcctatcgcggccgctggccgctcaaaaatggctggcctacggccaggcaatctaccagggcgcggacaagccgcgccgtcgccactcgaccgccggcgctgaggtctgcctcgtgaagaaggtgttgctgactcataccaggcctgaatcgccccatcatccagccagaaagtgagggagccacggttgatgagagctttgttgtaggtggaccagttggtgattttgaacttttgctttgccacggaacggtctgcgttgtcgggaagatgcgtgatctgatccttcaactcagcaaaagttcgatttattcaacaaagccgccgtcccgtcaagtcagcgtaatgctctgccagtgttacaaccaattaaccaattctgattagaaaaactcatcgagcatcaaatgaaactgcaatttattcatatcaggattatcaataccatatttttgaaaaagccgtttctgtaatgaaggagaaaactcaccgaggcagttccataggatggcaagatcctggtatcggtctgcgattccgactcgtccaacatcaatacaacctattaatttcccctcgtcaaaaataaggttatcaagtgagaaatcaccatgagtgacgactgaatccggtgagaatggcaaaagctctgcattaatgaatcggccaacgcgcggggagaggcggtttgcgtattgggcgctcttccgcttcctcgctcactgactcgctgcgctcggtcgttcggctgcggcgagcggtatcagctcactcaaaggcggtaatacggttatccacagaatcaggggataacgcaggaaagaacatgtgagcaaaaggccagcaaaaggccaggaaccgtaaaaaggccgcgttgctggcgtttttccataggctccgcccccctgacgagcatcacaaaaatcgacgctcaagtcagaggtggcgaaacccgacaggactataaagataccaggcgtttccccctggaagctccctcgtgcgctctcctgttccgaccctgccgcttaccggatacctgtccgcctttctcccttcgggaagcgtggcgctttctcatagctcacgctgtaggtatctcagttcggtgtaggtcgttcgctccaagctgggctgtgtgcacgaaccccccgttcagcccgaccgctgcgccttatccggtaactatcgtcttgagtccaacccggtaagacacgacttatcgccactggcagcagccactggtaacaggattagcagagcgaggtatgtaggcggtgctacagagttcttgaagtggtggcctaactacggctacactagaagaacagtatttggtatctgcgctctgctgaagccagttaccttcggaaaaagagttggtagctcttgatccggcaaacaaaccaccgctggtagcggtggtttttttgtttgcaagcagcagattacgcgcagaaaaaaaggatctcaagaagatcctttgatcttttctacggggtctgacgctcagtggaacgaaaactcacgttaagggattttggtcatgagattatcaaaaaggatcttcacctagatccttttgatccggaatta

SEQ ID NO: 85 - protein, 1341 aa, synthetic construct
MPKKKRKVGGGGSGGGGSGGGGSGGGGSGGGGSGGGGSMLFQDFTHLYPLSKTVRFELKPIGRTLEHIHAKNFLSQDETMADMYQKVKVILDDYHRDFIADMMGEVKLTKLAEFYDVYLKFRKNPKDDGLQKQLKDLQAVLRKESVKPIGSGGKYKTGYDRLFGAKLFKDGKELGDLAKFVIAQEGESSPKLAHLAHFEKFSTYFTGFHDNRKNMYSDEDKHTAIAYRLIHENLPRFIDNLQILTTIKQKHSALYDQIINELTASGLDVSLASHLDGYHKLLTQEGITAYNRIIGEVNGYTNKHNQICHKSERIAKLRPLHKQILSDGMGVSFLPSKFADDSEMCQAVNEFYRHYTDVFAKVQSLFDGFDDHQKDGIYVEHKNLNELSKQAFGDFALLGRVLDGYYVDVVNPEFNERFAKAKTDNAKAKLTKEKDKFIKGVHSLASLEQAIEHHTARHDDESVQAGKLGQYFKHGLAGVDNPIQKIHNNHSTIKGFLERERPAGERALPKIKSGKNPEMTQLRQLKELLDNALNVAHFAKLLTTKTTLDNQDGNFYGEFGVLYDELAKIPTLYNKVRDYLSQKPYSTEKYKLNFGNPTLLNGWDLNKEKDNFGVILQKDGCYYLALLDKAHKKVFDNAPNTGKNVYQKMVYKLLPGPNKMLPKVFFAKSNLDYYNPSAELLDKYAKGTHKKGDNFNLKDCHALIDFFKAGINKHPEWQHFGFKFSPTSSYRDLSDFYREVEPQGYQVKFVDINADYIDELVEQGKLYLFQIYNKDFSPKAHGKPNLHTLYFKALFSEDNLADPIYKLNGEAQIFYRKASLDMNETTIHRAGEVLENKNPDNPKKRQFVYDIIKDKRYTQDKFMLHVPITMNFGVQGMTIKEFNKKVNQSIQQYDEVNVIGIDRGERHLLYLTVINSKGEILEQRSLNDITTASANGTQVTTPYHKILDKREIERLNARVGWGEIETIKELKSGYLSHVVHQINQLMLKYNAIVVLEDLNFGFKRGRFKVEKQIYQNFENALIKKLNHLVLKDKADDEIGSYKNALQLTNNFTDLKSIGKQTGFLFYVPAWNTSKIDPETGFVDLLKPRYENIAQSQAFFGKFDKICYNTDKGYFEFHIDYAKFTDKAKNSRQKWAICSHGDKRYVYDKTANQNKGAAKGINVNDELKSLFARYHINDKQPNLVMDICQNNDKEFHKSLMCLLKTLLALRYSNASSDEDFILSPVANDEGVFFNSALADDTQPQNADANGAYHIALKGLWLLNELKNSDDLNKVKLAIDNQTWLNFAQNRGGGGSGGGGSGGGGSGGGGSGGGGSGGGGSPKKKRKVSGGSSGGSPKKKRKV

SEQ ID NO: 86 - protein, 1341 aa, synthetic construct
MPKKKRKVGGGGSGGGGSGGGGSGGGGSGGGGSGGGGSMLFQDFTHLYPLSKTVRFELKPIGRTLEHIHAKNFLSQDETMADMYQKVKVILDDYHRDFIADMMGEVKLTKLAEFYDVYLKFRKNPKDDGLQKQLKDLQAVLRKESVKPIGSGGKYKTGYDRLFGAKLFKDGKELGDLAKFVIAQEGESSPKLAHLAHFEKFSTYFTGFHDNRKNMYSDEDKHTAIAYRLIHENLPRFIDNLQILTTIKQKHSALYDQIINELTASGLDVSLASHLDGYHKLLTQEGITAYNRIIGEVNGYTNKHNQICHKSERIAKLRPLHKQILSDGMGVSFLPSKFADDSEMCQAVNEFYRHYTDVFAKVQSLFDGFDDHQKDGIYVEHKNLNELSKQAFGDFALLGRVLDGYYVDVVNPEFNERFAKAKTDNAKAKLTKEKDKFIKGVHSLASLEQAIEHHTARHDDESVQAGKLGQYFKHGLAGVDNPIQKIHNNHSTIKGFLERERPAGERALPKIKSGKNPEMTQLRQLKELLDNALNVAHFAKLLTTKTTLDNQDGNFYGEFGVLYDELAKIPTLYNKVRDYLSQKPFSTEKYKLNFGNPTLLNGWDLNKEKDNFGVILQKDGCYYLALLDKAHKKVFDNAPNTGKNVYQKMVYKLLPGPNKMLPKVFFAKSNLDYYNPSAELLDKYAKGTHKKGDNFNLKDCHALIDFFKAGINKHPEWQHFGFKFSPTSSYRDLSDFYREVEPQGYQVKFVDINADYIDELVEQGKLYLFQIYNKDFSPKSHGKPNLHTLYFKALFSEDNLADPIYKLNGEAQIFYRKASLDMNETTIHRAGEVLENKNPDNPKKRQFVYDIIKDKRYTQDKFMLHVPITMNFGVQGMTIKEFNKKVNQSIQQYDEVNVIGIDRGERHLLYLTVINSKGEILEQRSLNDITTASANGTQVTTPYHKILDKREIERLNARVGWGEIETIKELKSGYLSHVVHQINQLMLKYNAIVVLEDLNFGFKRGRFKVEKQIYQNFENALIKKLNHLVLKDKADDEIGSYKNALQLTNNFTDLKSIGKQTGFLFYVPAWNTSKIDPETGFVDLLKPRYENIAQSQAFFGKFDKICYNTDKGYFEFHIDYAKFTDKAKNSRQKWAICSHGDKRYVYDKTANQNKGAAKGINVNDELKSLFARYHINDKQPNLVMDICQNNDKEFHKSLMCLLKTLLALRYSNASSDEDFILSPVANDEGVFFNSALADDTQPQNADANGAYHIALKGLWLLNELKNSDDLNKVKLAIDNQTWLNFAQNRGGGGSGGGGSGGGGSGGGGSGGGGSGGGGSPKKKRKVSGGSSGGSPKKKRKV

SEQ ID NO: 87 - protein, 1341 aa, synthetic construct
MPKKKRKVGGGGSGGGGSGGGGSGGGGSGGGGSGGGGSMLFQDFTHLYPLSKTVRFELKPIGRTLEHIHAKNFLSQDETMADMYQKVKVILDDYHRDFIADMMGEVKLTKLAEFYDVYLKFRKNPKDDGLQKQLKDLQAVLRKESVKPIGSGGKYKTGYDRLFGAKLFKDGKELGDLAKFVIAQEGESSPKLAHLAHFEKFSTYFTGFHDNRKNMYSDEDKHTAIAYRLIHENLPRFIDNLQILTTIKQKHSALYDQIINELTASGLDVSLASHLDGYHKLLTQEGITAYNRIIGEVNGYTNKHNQICHKSERIAKLRPLHKQILSDGMGVSFLPSKFADDSEMCQAVNEFYRHYTDVFAKVQSLFDGFDDHQKDGIYVEHKNLNELSKQAFGDFALLGRVLDGYYVDVVNPEFNERFAKAKTDNAKAKLTKEKDKFIKGVHSLASLEQAIEHHTARHDDESVQAGKLGQYFKHGLAGVDNPIQKIHNNHSTIKGFLERERPAGERALPKIKSGKNPEMTQLRQLKELLDNALNVAHFAKLLTTKTTLDNQDGNFYGEFGVLYDELAKIPTLYNKVRDYLSQKPFSTEKYKLNFGNPTLLNGWDLNKEKDNFGVILQKDGCYYLALLDKAHKKVFDNAPNTGKNVYQKMVYKLLPGPNKMLPKVFFAKSNLDYYNPSAELLDKYAKGTHKKGDNFNLKDCHALIDFFKAGINKHPEWQHFGFKFSPTSSYRDLSDFYREVEPQGYQVKFVDINADYIDELVEQGKLYLFQIYNKDFSPKAHGKPNLHTLYFKALFSEDNLADPIYKLNGEAQIFYRKASLDMNETTIHRAGEVLENKNPDNPKKRQFVYDIIKDKRFTQDKFMLHVPITMNFGVQGMTIKEFNKKVNQSIQQYDEVNVIGIDRGERHLLYLTVINSKGEILEQRSLNDITTASANGTQVTTPYHKILDKREIERLNARVGWGEIETIKELKSGYLSHVVHQINQLMLKYNAIVVLEDLNFGFKRGRFKVEKQIYQNFENALIKKLNHLVLKDKADDEIGSYKNALQLTNNFTDLKSIGKQTGFLFYVPAWNTSKIDPETGFVDLLKPRYENIAQSQAFFGKFDKICYNTDKGYFEFHIDYAKFTDKAKNSRQKWAICSHGDKRYVYDKTANQNKGAAKGINVNDELKSLFARYHINDKQPNLVMDICQNNDKEFHKSLMCLLKTLLALRYSNASSDEDFILSPVANDEGVFFNSALADDTQPQNADANGAYHIALKGLWLLNELKNSDDLNKVKLAIDNQTWLNFAQNRGGGGSGGGGSGGGGSGGGGSGGGGSGGGGSPKKKRKVSGGSSGGSPKKKRKV

SEQ ID NO: 88 - protein, 1341 aa, synthetic construct
MPKKKRKVGGGGSGGGGSGGGGSGGGGSGGGGSGGGGSMLFQDFTHLYPLSKTVRFELKPIGRTLEHIHAKNFLSQDETMADMYQKVKVILDDYHRDFIADMMGEVKLTKLAEFYDVYLKFRKNPKDDGLQKQLKDLQAVLRKESVKPIGSGGKYKTGYDRLFGAKLFKDGKELGDLAKFVIAQEGESSPKLAHLAHFEKFSTYFTGFHDNRKNMYSDEDKHTAIAYRLIHENLPRFIDNLQILTTIKQKHSALYDQIINELTASGLDVSLASHLDGYHKLLTQEGITAYNRIIGEVNGYTNKHNQICHKSERIAKLRPLHKQILSDGMGVSFLPSKFADDSEMCQAVNEFYRHYTDVFAKVQSLFDGFDDHQKDGIYVEHKNLNELSKQAFGDFALLGRVLDGYYVDVVNPEFNERFAKAKTDNAKAKLTKEKDKFIKGVHSLASLEQAIEHHTARHDDESVQAGKLGQYFKHGLAGVDNPIQKIHNNHSTIKGFLERERPAGERALPKIKSGKNPEMTQLRQLKELLDNALNVAHFAKLLTTKTTLDNQDGNFYGEFGVLYDELAKIPTLYNKVRDYLSQKPFSTEKYKLNFGNPTLLNGWDLNKEKDNFGVILQKDGCYYLALLDKAHKKVFDNAPNTGKNVYQKMVYKLLPGPNKMLPKVFFAKSNLDYYNPSAELLDKYAKGTHKKGDNFNLKDCHALIDFFKAGINKHPEWQHFGFKFSPTSSYRDLSDFYREVEPQGYQVKFVDINADYIDELVEQGKLYLFQIYNKDFSPKAHGKPNLHTLYFKALFSEDNLADPIYKLNGEAQIFYRKASLDMNETTIHRAGEVLENKNPDNPKKRQFVYDIIKDKRYTQDKFMLHVPITMNFGVQGMTIKEFNKKVNQSIQQYDEVNVIGIDRGERHLLYLTVINSKGEILEQRSLNDITTASANGTQVTTPYHKILDKREIERLNARVGWGEIETIKELKSGYLSQVVHQINQLMLKYNAIVVLEDLNFGFKRGRFKVEKQIYQNFENALIKKLNHLVLKDKADDEIGSYKNALQLTNNFTDLKSIGKQTGFLFYVPAWNTSKIDPETGFVDLLKPRYENIAQSQAFFGKFDKICYNTDKGYFEFHIDYAKFTDKAKNSRQKWAICSHGDKRYVYDKTANQNKGAAKGINVNDELKSLFARYHINDKQPNLVMDICQNNDKEFHKSLMCLLKTLLALRYSNASSDEDFILSPVANDEGVFFNSALADDTQPQNADANGAYHIALKGLWLLNELKNSDDLNKVKLAIDNQTWLNFAQNRGGGGSGGGGSGGGGSGGGGSGGGGSGGGGSPKKKRKVSGGSSGGSPKKKRKV

SEQ ID NO: 89 - protein, 1332 aa, synthetic construct
MPKKKRKVGGGGSGGGGSGGGGSGGGGSGGGGSGGGGSMLFQDFTHLYPLSKTVRFELKPIGRTLEHIHAKNFLSQDETMADMYQKVKVILDDYHRDFIADMMGEVKLTKLAEFYDVYLKFRKNPKDDGLQKQLKDLQAVLRKESVKPIGSGGKYKTGYDRLFGAKLFKDGKELGDLAKFVIAQEGESSPKLAHLAHFEKFSTYFTGFHRNRKNMYSDEDKHTAIAYRLIHENLPRFIDNLQILTTIKQKHSALYDQIINELTASGLDVSLASHLDGYHKLLTQEGITAYNRIIGEVNGYTNKHNQICHKSERIAKLRPLHKQILSDGMGVSFLPSKFADDSEMCQAVNEFYRHYTDVFAKVQSLFDGFDDHQKDGIYVEHKNLNELSKQAFGDFALLGRVLDGYYVDVVNPEFNERFAKAKTDNAKAKLTKEKDKFIKGVHSLASLEQAIEHHTARHDDESVQAGKLGQYFKHGLAGVDNPIQKIHNNHSTIKGFLERERPAGERALPKIKSGKNPEMTQLRQLKELLDNALNVAHFAKLLTTKTTLDNQDGNFYGEFGVLYDELAKIPTLYNKVRDYLSQKPFSTEKYKLNFGNPTLLNGWDLNKEKDNFGVILQKDGCYYLALLDKAHKKVFDNAPNTGKNVYQKMVYKLLPGPNKMLPKVFFAKSNLDYYNPSAELLDKYAKGTHKKGDNFNLKDCHALIDFFKAGINKHPEWQHFGFKFSPTSSYRDLSDFYREVEPQGYQVKFVDINADYIDELVEQGKLYLFQIYNKDFSPKAHGKPNLHTLYFKALFSEDNLADPIYKLNGEAQIFYRKASLDMNETTIHRAGEVLENKNPDNPKKRQFVYDIIKDKRYTQDKFMLHVPITMNFGVQGMTIKEFNKKVNQSIQQYDEVNVIGIDRGERHLLYLTVINSKGEILEQRSLNTIQQFDYQKKLDNREKERVAARQAWGEIETIKELKSGYLSHVVHQINQLMLKYNAIVVLEDLNFGFKRGRFKVEKQIYQNFENALIKKLNHLVLKDKADDEIGSYKNALQLTNNFTDLKSIGKQTGFLFYVPAWNTSKIDPETGFVDLLKPRYENIAQSQAFFGKFDKICYNTDKGYFEFHIDYAKFTDKAKNSRQKWAICSHGDKRYVYDKTANQNKGAAKGINVNDELKSLFARYHINDKQPNLVMDICQNNDKEFHKSLMCLLKTLLALRYSNASSDEDFILSPVANDEGVFFNSALADDTQPQNADANGAYHIALKGLWLLNELKNSDDLNKVKLAIDNQTWLNFAQNRGGGGSGGGGSGGGGSGGGGSGGGGSGGGGSPKKKRKVSGGSSGGSPKKKRKV

SEQ ID NO: 90 - protein, 1332 aa, synthetic construct
MPKKKRKVGGGGSGGGGSGGGGSGGGGSGGGGSGGGGSMLFQDFTHLYPLSKTVRFELKPIGRTLEHIHAKNFLSQDETMADMYQKVKVILDDYHRDFIADMMGEVKLTKLAEFYDVYLKFRKNPKDDGLQKQLKDLQAVLRKESVKPIGSGGKYKTGYDRLFGAKLFKDGKELGDLAKFVIAQEGESSPKLAHLAHFEKFSTYFTGFHDNRKNMYSDEDKHTAIAYRLIHENLPRFIDNLQILTTIKQKHSALYDQIINELTASGLDVSLASHLDGYHKLLTQEGITAYNRIIGEVNGYTNKHNQICHKSERIAKLRPLHKQILSDGMGVSFLPSKFADDSEMCQAVNEFYRHYTDVFAKVQSLFDGFDDHQKDGIYVEHKNLNELSKQAFGDWALLGRVLDGYYVDVVNPEFNERFAKAKTDNAKAKLTKEKDKFIKGVHSLASLEQAIEHHTARHDDESVQAGKLGQYFKHGLAGVDNPIQKIHNNHSTIKGFLERERPAGERALPKIKSGKNPEMTQLRQLKELLDNALNVAHFAKLLTTKTTLDNQDGNFYGEFGVLYDELAKIPTLYNKVRDYLSQKPFSTEKYKLNFGNPTLLNGWDLNKEKDNFGVILQKDGCYYLALLDKAHKKVFDNAPNTGKNVYQKMVYKLLPGPNKMLPKVFFAKSNLDYYNPSAELLDKYAKGTHKKGDNFNLKDCHALIDFFKAGINKHPEWQHFGFKFSPTSSYRDLSDFYREVEPQGYQVKFVDINADYIDELVEQGKLYLFQIYNKDFSPKAHGKPNLHTLYFKALFSEDNLADPIYKLNGEAQIFYRKASLDMNETTIHRAGEVLENKNPDNPKKRQFVYDIIKDKRYTQDKFMLHVPITMNFGVQGMTIKEFNKKVNQSIQQYDEVNVIGIDRGERHLLYLTVINSKGEILEQRSLNTIQQFDYQKKLDNREKERVAARQAWGEIETIKELKSGYLSHVVHQINQLMLKYNAIVVLEDLNFGFKRGRFKVEKQIYQNFENALIKKLNHLVLKDKADDEIGSYKNALQLTNNFTDLKSIGKQTGFLFYVPAWNTSKIDPETGFVDLLKPRYENIAQSQAFFGKFDKICYNTDKGYFEFHIDYAKFTDKAKNSRQKWAICSHGDKRYVYDKTANQNKGAAKGINVNDELKSLFARYHINDKQPNLVMDICQNNDKEFHKSLMCLLKTLLQMRNSNAATGEDYILSPVANDEGVFFNSALADDTQPQNADANGAYHIALKGLWLLNELKNSDDLNKVKLAIDNQTWLNFAQNRGGGGSGGGGSGGGGSGGGGSGGGGSGGGGSPKKKRKVSGGSSGGSPKKKRKV

SEQ ID NO: 91 - protein, 1332 aa, synthetic construct
MPKKKRKVGGGGSGGGGSGGGGSGGGGSGGGGSGGGGSMLFQDFTHLYPLSKTVRFELKPIGRTLEHIHAKNFLSQDETMADMYQKVKVILDDYHRDFIADMMGEVKLTKLAEFYDVYLKFRKNPKDDGLQKQLKDLQAVLRKESVKPIGSGGKYKTGYDRLFGAKLFKDGKELGDLAKFVIAQEGESSPKLAHLAHFEKFSTYFTGFHRNRKNMYSDEDKHTAIAYRLIHENLPRFIDNLQILTTIKQKHSALYDQIINELTASGLDVSLASHLDGYHKLLTQEGITAYNRIIGEVNGYTNKHNQICHKSERIAKLRPLHKQILSDGMGVSFLPSKFADDSEMCQAVNEFYRHYTDVFAKVQSLFDGFDDHQKDGIYVEHKNLNELSKQAFGDWALLGRVLDGYYVDVVNPEFNERFAKAKTDNAKAKLTKEKDKFIKGVHSLASLEQAIEHHTARHDDESVQAGKLGQYFKHGLAGVDNPIQKIHNNHSTIKGFLERERPAGERALPKIKSGKNPEMTQLRQLKELLDNALNVAHFAKLLTTKTTLDNQDGNFYGEFGVLYDELAKIPTLYNKVRDYLSQKPFSTEKYKLNFGNPTLLNGWDLNKEKDNFGVILQKDGCYYLALLDKAHKKVFDNAPNTGKNVYQKMVYKLLPGPNKMLPKVFFAKSNLDYYNPSAELLDKYAKGTHKKGDNFNLKDCHALIDFFKAGINKHPEWQHFGFKFSPTSSYRDLSDFYREVEPQGYQVKFVDINADYIDELVEQGKLYLFQIYNKDFSPKAHGKPNLHTLYFKALFSEDNLADPIYKLNGEAQIFYRKASLDMNETTIHRAGEVLENKNPDNPKKRQFVYDIIKDKRYTQDKFMLHVPITMNFGVQGMTIKEFNKKVNQSIQQYDEVNVIGIDRGERHLLYLTVINSKGEILEQRSLNTIQQFDYQKKLDNREKERVAARQAWGEIETIKELKSGYLSHVVHQINQLMLKYNAIVVLEDLNFGFKRGRFKVEKQIYQNFENALIKKLNHLVLKDKADDEIGSYKNALQLTNNFTDLKSIGKQTGFLFYVPAWNTSKIDPETGFVDLLKPRYENIAQSQAFFGKFDKICYNTDKGYFEFHIDYAKFTDKAKNSRQKWAICSHGDKRYVYDKTANQNKGAAKGINVNDELKSLFARYHINDKQPNLVMDICQNNDKEFHKSLMCLLKTLLQMRNSNAATGEDYILSPVANDEGVFFNSALADDTQPQNADANGAYHIALKGLWLLNELKNSDDLNKVKLAIDNQTWLNFAQNRGGGGSGGGGSGGGGSGGGGSGGGGSGGGGSPKKKRKVSGGSSGGSPKKKRKV

SEQ ID NO: 92 - protein, 1332 aa, synthetic construct
MPKKKRKVGGGGSGGGGSGGGGSGGGGSGGGGSGGGGSMLFQDFTHLYPLSKTVRFELKPIGRTLEHIHAKNFLSQDETMADMYQKVKVILDDYHRDFIADMMGEVKLTKLAEFYDVYLKFRKNPKDDGLQKQLKDLQAVLRKESVKPIGSGGKYKTGYDRLFGAKLFKDGKELGDLAKFVIAQEGESSPKLAHLAHFEKFSTYFTGFHDNRKNMYSDEDKHTAIAYRLIHENLPRFIDNLQILTTIKQKHSALYDQIINELTASGLDVSLASHLDGYHKLLTQEGITAYNRIIGEVNGYTNKHNQICHKSERIAKLRPLHKQILSDGMGVSFLPSKFADDSEMCQAVNEFYRHYTDVFAKVQSLFDGFDDHQKDGIYVEHKNLNELSKQAFGDWALLGRVLDGYYVDVVNPEFNERFAKAKTDNAKAKLTKEKDKFIKGVHSLASLEQAIEHHTARHDDESVQAGKLGQYFKHGLAGVDNPIQKIHNNHSTIKGFLERERPAGERALPKIKSGKNPEMTQLRQLKELLDNALNVAHFAKLLTTKTTLDNQDGNFYGEFGVLYDELAKIPTLYNKVRDYLSQKPFSTEKYKLNFGNPTLLNGWDLNKEKDNFGVILQKDGCYYLALLDKAHKKVFDNAPNTGKNVYQKMVYKLLPGPNKMLPKVFFAKSNLDYYNPSAELLDKYAKGTHKKGDNFNLKDCHALIDFFKAGINKHPEWQHFGFKFSPTSSYRDLSDFYREVEPQGYQVKFVDINADYIDELVEQGKLYLFQIYNKDFSPKAHGKPNLHTLYFKALFSEDNLADPIYKLNGEAQIFYRKASLDMNETTIHRAGEVLENKNPDNPKKRQFVYDIIKDKRYTQDKFMLHVPITMNFGVQGMTIKEFNKKVNQSIQQYDEVNVIGIDRGERHLLYLTVINSKGEILEQRSLNTIQQFDYQKKLDNREKERVAARKAWGEIETIKELKSGYLSHVVHQINQLMLKYNAIVVLEDLNFGFKRGRFKVEKQIYQNFENALIKKLNHLVLKDKADDEIGSYKNALQLTNNFTDLKSIGKQTGFLFYVPAWNTSKIDPETGFVDLLKPRYENIAQSQAFFGKFDKICYNTDKGYFEFHIDYAKFTDKAKNSRQKWAICSHGDKRYVYDKTANQNKGAAKGINVNDELKSLFARYHINDKQPNLVMDICQNNDKEFHKSLMCLLKTLLQMRNSNAATGEDYILSPVANDEGVFFNSALADDTQPQNADANGAYHIALKGLWLLNELKNSDDLNKVKLAIDNQTWLNFAQNRGGGGSGGGGSGGGGSGGGGSGGGGSGGGGSPKKKRKVSGGSSGGSPKKKRKV

SEQ ID NO: 93 - protein, 1332 aa, synthetic construct
MPKKKRKVGGGGSGGGGSGGGGSGGGGSGGGGSGGGGSMLFQDFTHLYPLSKTVRFELKPIGRTLEHIHAKNFLSQDETMADMYQKVKVILDDYHRDFIADMMGEVKLTKLAEFYDVYLKFRKNPKDDGLQKQLKDLQAVLRKESVKPIGSGGKYKTGYDRLFGAKLFKDGKELGDLAKFVIAQEGESSPKLAHLAHFEKFSTYFTGFHRNRKNMYSDEDKHTAIAYRLIHENLPRFIDNLQILTTIKQKHSALYDQIINELTASGLDVSLASHLDGYHKLLTQEGITAYNRIIGEVNGYTNKHNQICHKSERIAKLRPLHKQILSDGMGVSFLPSKFADDSEMCQAVNEFYRHYTDVFAKVQSLFDGFDDHQKDGIYVEHKNLNELSKQAFGDWALLGRVLDGYYVDVVNPEFNERFAKAKTDNAKAKLTKEKDKFIKGVHSLASLEQAIEHHTARHDDESVQAGKLGQYFKHGLAGVDNPIQKIHNNHSTIKGFLERERPAGERALPKIKSGKNPEMTQLRQLKELLDNALNVAHFAKLLTTKTTLDNQDGNFYGEFGVLYDELAKIPTLYNKVRDYLSQKPFSTEKYKLNFGNPTLLNGWDLNKEKDNFGVILQKDGCYYLALLDKAHKKVFDNAPNTGKNVYQKMVYKLLPGPNKMLPKVFFAKSNLDYYNPSAELLDKYAKGTHKKGDNFNLKDCHALIDFFKAGINKHPEWQHFGFKFSPTSSYRDLSDFYREVEPQGYQVKFVDINADYIDELVEQGKLYLFQIYNKDFSPKAHGKPNLHTLYFKALFSEDNLADPIYKLNGEAQIFYRKASLDMNETTIHRAGEVLENKNPDNPKKRQFVYDIIKDKRYTQDKFMLHVPITMNFGVQGMTIKEFNKKVNQSIQQYDEVNVIGIDRGERHLLYLTVINSKGEILEQRSLNTIQQFDYQKKLDNREKERVAARKAWGEIETIKELKSGYLSHVVHQINQLMLKYNAIVVLEDLNFGFKRGRFKVEKQIYQNFENALIKKLNHLVLKDKADDEIGSYKNALQLTNNFTDLKSIGKQTGFLFYVPAWNTSKIDPETGFVDLLKPRYENIAQSQAFFGKFDKICYNTDKGYFEFHIDYAKFTDKAKNSRQKWAICSHGDKRYVYDKTANQNKGAAKGINVNDELKSLFARYHINDKQPNLVMDICQNNDKEFHKSLMCLLKTLLQMRNSNAATGEDYILSPVANDEGVFFNSALADDTQPQNADANGAYHIALKGLWLLNELKNSDDLNKVKLAIDNQTWLNFAQNRGGGGSGGGGSGGGGSGGGGSGGGGSGGGGSPKKKRKVSGGSSGGSPKKKRKV

SEQ ID NO: 94 - protein, 1332 aa, synthetic construct
MPKKKRKVGGGGSGGGGSGGGGSGGGGSGGGGSGGGGSMLFQDFTHLYPLSKTVRFELKPIGRTLEHIHAKNFLSQDETMADMYQKVKVILDDYHRDFIADMMGEVKLTKLAEFYDVYLKFRKNPKDDGLQKQLKDLQAVLRKESVKPIGSGGKYKTGYDRLFGAKLFKDGKELGDLAKFVIAQEGESSPKLAHLAHFEKFSTYFTGFHDNRKNMYSDEDKHTAIAYRLIHENLPRFIDNLQILTTIKQKHSALYDQIINELTASGLDVSLASHLDGYHKLLTQEGITAYNRIIGEVNGYTNKHNQICHKSERIAKLRPLHKQILSDGMGVSFLPSKFADDSEMCQAVNEFYRHYTDVFAKVQSLFDGFDDHQKDGIYVEHKNLNELSKQAFGDWALLGRVLDGYYVDVVNPEFNERFAKAKTDNAKAKLTKEKDKFIKGVHSLASLEQAIEHHTARHDDESVQAGKLGQYFKHGLAGVDNPIQKIHNNHSTIKGFLERERPAGERALPKIKSGKNPEMTQLRQLKELLDNALNVAHFAKLLTTKTTLDNQDGNFYGEFGVLYDELAKIPTLYNKVRDYLSQKPFSTEKYKLNFGNPTLLNGWDLNKEKDNFGVILQKDGCYYLALLDKAHKKVFDNAPNTGKNVYQKMVYKLLPGPNKMLPKVFFAKSNLDYYNPSAELLDKYAKGTHKKGDNFNLKDCHALIDFFKAGINKHPEWQHFGFKFSPTSSYRDLSDFYREVEPQGYQVKFVDINADYIDELVEQGKLYLFQIYNKDFSPKAHGKPNLHTLYFKALFSEDNLADPIYKLNGEAQIFYRKASLDMNETTIHRAGEVLANKNPDNPKKRQFVYDIIKDKRYTQDKFMLHVPITMNFGVQGMTIKEFNKKVNQSIQQYDEVNVIGIDRGERHLLYLTVINSKGEILEQRSLNTIQQFDYQKKLDNREKERVAARKAWGEIETIKELKSGYLSHVVHQINQLMLKYNAIVVLEDLNFGFKRGRFKVEKQIYQNFENALIKKLNHLVLKDKADDEIGSYKNALQLTNNFTDLKSIGKQTGFLFYVPAWNTSKIDPETGFVDLLKPRYENIAQSQAFFGKFDKICYNTDKGYFEFHIDYAKFTDKAKNSRQKWAICSHGDKRYVYDKTANQNKGAAKGINVNDELKSLFARYHINDKQPNLVMDICQNNDKEFHKSLMCLLKTLLQMRNSNAATGEDYILSPVANDEGVFFNSALADDTQPQNADANGAYHIALKGLWLLNELKNSDDLNKVKLAIDNQTWLNFAQNRGGGGSGGGGSGGGGSGGGGSGGGGSGGGGSPKKKRKVSGGSSGGSPKKKRKV

SEQ ID NO: 95 - protein, 1332 aa, synthetic construct
MPKKKRKVGGGGSGGGGSGGGGSGGGGSGGGGSGGGGSMLFQDFTHLYPLSKTVRFELKPIGRTLEHIHAKNFLSQDETMADMYQKVKVILDDYHRDFIADMMGEVKLTKLAEFYDVYLKFRKNPKDDGLQKQLKDLQAVLRKESVKPIGSGGKYKTGYDRLFGAKLFKDGKELGDLAKFVIAQEGESSPKLAHLAHFEKFSTYFTGFHRNRKNMYSDEDKHTAIAYRLIHENLPRFIDNLQILTTIKQKHSALYDQIINELTASGLDVSLASHLDGYHKLLTQEGITAYNRIIGEVNGYTNKHNQICHKSERIAKLRPLHKQILSDGMGVSFLPSKFADDSEMCQAVNEFYRHYTDVFAKVQSLFDGFDDHQKDGIYVEHKNLNELSKQAFGDWALLGRVLDGYYVDVVNPEFNERFAKAKTDNAKAKLTKEKDKFIKGVHSLASLEQAIEHHTARHDDESVQAGKLGQYFKHGLAGVDNPIQKIHNNHSTIKGFLERERPAGERALPKIKSGKNPEMTQLRQLKELLDNALNVAHFAKLLTTKTTLDNQDGNFYGEFGVLYDELAKIPTLYNKVRDYLSQKPFSTEKYKLNFGNPTLLNGWDLNKEKDNFGVILQKDGCYYLALLDKAHKKVFDNAPNTGKNVYQKMVYKLLPGPNKMLPKVFFAKSNLDYYNPSAELLDKYAKGTHKKGDNFNLKDCHALIDFFKAGINKHPEWQHFGFKFSPTSSYRDLSDFYREVEPQGYQVKFVDINADYIDELVEQGKLYLFQIYNKDFSPKAHGKPNLHTLYFKALFSEDNLADPIYKLNGEAQIFYRKASLDMNETTIHRAGEVLANKNPDNPKKRQFVYDIIKDKRYTQDKFMLHVPITMNFGVQGMTIKEFNKKVNQSIQQYDEVNVIGIDRGERHLLYLTVINSKGEILEQRSLNTIQQFDYQKKLDNREKERVAARKAWGEIETIKELKSGYLSHVVHQINQLMLKYNAIVVLEDLNFGFKRGRFKVEKQIYQNFENALIKKLNHLVLKDKADDEIGSYKNALQLTNNFTDLKSIGKQTGFLFYVPAWNTSKIDPETGFVDLLKPRYENIAQSQAFFGKFDKICYNTDKGYFEFHIDYAKFTDKAKNSRQKWAICSHGDKRYVYDKTANQNKGAAKGINVNDELKSLFARYHINDKQPNLVMDICQNNDKEFHKSLMCLLKTLLQMRNSNAATGEDYILSPVANDEGVFFNSALADDTQPQNADANGAYHIALKGLWLLNELKNSDDLNKVKLAIDNQTWLNFAQNRGGGGSGGGGSGGGGSGGGGSGGGGSGGGGSPKKKRKVSGGSSGGSPKKKRKV

SEQ ID NO: 96 - protein, 1332 aa, synthetic construct
MPKKKRKVGGGGSGGGGSGGGGSGGGGSGGGGSGGGGSMLFQDFTHLYPLSKTVRFELKPIGRTLEHIHAKNFLSQDETMADMYQKVKVILDDYHRDFIADMMGEVKLTKLAEFYDVYLKFRKNPKDDGLQKQLKDLQAVLRKESVKPIGSGGKYKTGYDRLFGAKLFKDGKELGDLAKFVIAQEGESSPKLAHLAHFEKFSTYFTGFHDNRKNMYSDEDKHTAIAYRLIHENLPRFIDNLQILTTIKQKHSALYDQIINELTASGLDVSLASHLDGYHKLLTQEGITAYNRIIGEVNGYTNKHNQICHKSERIAKLRPLHKQILSDGMGVSFLPSKFADDSEMCQAVNEFYRHYTDVFAKVQSLFDGFDDHQKDGIYVEHKNLNELSKQAFGDWALLGRVLDGYYVDVVNPEFNERFAKAKTDNAKAKLTKEKDKFIKGVHSLASLEQAIEHHTARHDDESVQAGKLGQYFKHGLAGVDNPIQKIHNNHSTIKGFLERERPAGERALPKIKSGKNPEMTQLRQLKELLDNALNVAHFAKLLTTKTTLDNQDGNFYGEFGVLYDELAKIPTLYNKVRDYLSQKPFSTEKYKLNFGNPTLLNGWDLNKEKDNFGVILQKDGCYYLALLDKAHKKVFDNAPNTGKNVYQKMVYKLLPGPNKMLPKVFFAKSNLDYYNPSAELLDKYAKGTHKKGDNFNLKDCHALIDFFKAGINKHPEWQHFGFKFSPTSSYRDLSDFYREVEPQGYQVKFVDINADYIDELVEQGKLYLFQIYNKDFSPKAHGKPNLHTLYFKALFSEDNLADPIYKLNGEAQIFYRKASLKKEELVVHRAGEVLANKNPDNPKKRQFVYDIIKDKRYTQDKFMLHVPITMNFGVQGMTIKEFNKKVNQSIQQYDEVNVIGIDRGERHLLYLTVINSKGEILEQRSLNTIQQFDYQKKLDNREKERVAARKAWGEIETIKELKSGYLSHVVHQINQLMLKYNAIVVLEDLNFGFKRGRFKVEKQIYQNFENALIKKLNHLVLKDKADDEIGSYKNALQLTNNFTDLKSIGKQTGFLFYVPAWNTSKIDPETGFVDLLKPRYENIAQSQAFFGKFDKICYNTDKGYFEFHIDYAKFTDKAKNSRQKWAICSHGDKRYVYDKTANQNKGAAKGINVNDELKSLFARYHINDKQPNLVMDICQNNDKEFHKSLMCLLKTLLQMRNSNAATGEDYILSPVANDEGVFFNSALADDTQPQNADANGAYHIALKGLWLLNELKNSDDLNKVKLAIDNQTWLNFAQNRGGGGSGGGGSGGGGSGGGGSGGGGSGGGGSPKKKRKVSGGSSGGSPKKKRKV

SEQ ID NO: 97 - protein, 1332 aa, synthetic construct
MPKKKRKVGGGGSGGGGSGGGGSGGGGSGGGGSGGGGSMLFQDFTHLYPLSKTVRFELKPIGRTLEHIHAKNFLSQDETMADMYQKVKVILDDYHRDFIADMMGEVKLTKLAEFYDVYLKFRKNPKDDGLQKQLKDLQAVLRKESVKPIGSGGKYKTGYDRLFGAKLFKDGKELGDLAKFVIAQEGESSPKLAHLAHFEKFSTYFTGFHRNRKNMYSDEDKHTAIAYRLIHENLPRFIDNLQILTTIKQKHSALYDQIINELTASGLDVSLASHLDGYHKLLTQEGITAYNRIIGEVNGYTNKHNQICHKSERIAKLRPLHKQILSDGMGVSFLPSKFADDSEMCQAVNEFYRHYTDVFAKVQSLFDGFDDHQKDGIYVEHKNLNELSKQAFGDWALLGRVLDGYYVDVVNPEFNERFAKAKTDNAKAKLTKEKDKFIKGVHSLASLEQAIEHHTARHDDESVQAGKLGQYFKHGLAGVDNPIQKIHNNHSTIKGFLERERPAGERALPKIKSGKNPEMTQLRQLKELLDNALNVAHFAKLLTTKTTLDNQDGNFYGEFGVLYDELAKIPTLYNKVRDYLSQKPFSTEKYKLNFGNPTLLNGWDLNKEKDNFGVILQKDGCYYLALLDKAHKKVFDNAPNTGKNVYQKMVYKLLPGPNKMLPKVFFAKSNLDYYNPSAELLDKYAKGTHKKGDNFNLKDCHALIDFFKAGINKHPEWQHFGFKFSPTSSYRDLSDFYREVEPQGYQVKFVDINADYIDELVEQGKLYLFQIYNKDFSPKAHGKPNLHTLYFKALFSEDNLADPIYKLNGEAQIFYRKASLKKEELVVHRAGEVLANKNPDNPKKRQFVYDIIKDKRYTQDKFMLHVPITMNFGVQGMTIKEFNKKVNQSIQQYDEVNVIGIDRGERHLLYLTVINSKGEILEQRSLNTIQQFDYQKKLDNREKERVAARKAWGEIETIKELKSGYLSHVVHQINQLMLKYNAIVVLEDLNFGFKRGRFKVEKQIYQNFENALIKKLNHLVLKDKADDEIGSYKNALQLTNNFTDLKSIGKQTGFLFYVPAWNTSKIDPETGFVDLLKPRYENIAQSQAFFGKFDKICYNTDKGYFEFHIDYAKFTDKAKNSRQKWAICSHGDKRYVYDKTANQNKGAAKGINVNDELKSLFARYHINDKQPNLVMDICQNNDKEFHKSLMCLLKTLLQMRNSNAATGEDYILSPVANDEGVFFNSALADDTQPQNADANGAYHIALKGLWLLNELKNSDDLNKVKLAIDNQTWLNFAQNRGGGGSGGGGSGGGGSGGGGSGGGGSGGGGSPKKKRKVSGGSSGGSPKKKRKV

SEQ ID NO: 98 - protein, 1332 aa, synthetic construct
MPKKKRKVGGGGSGGGGSGGGGSGGGGSGGGGSGGGGSMLFQDFTHLYPLSKTVRFELKPIGRTLEHIHAKNFLSQDETMADMYQKVKVILDDYHRDFIADMMGEVKLTKLAEFYDVYLKFRKNPKDDGLQKQLKDLQAVLRKESVKPIGSGGKYKTGYDRLFGAKLFKDGKELGDLAKFVIAQEGESSPKLAHLAHFEKFSTYFTGFHDNRKNMYSDEDKHTAIAYRLIHENLPRFIDNLQILTTIKQKHSALYDQIINELTASGLDVSLASHLDGYHKLLTQEGITAYNRIIGEVNGYTNKHNQICHKSERIAKLRPLHKQILSDGMGVSFLPSKFADDSEMCQAVNEFYRHYTDVFAKVQSLFDGFDDHQKDGIYVEHKNLNELSKQAFGDFALLGRVLDGYYVDVVNPEFNERFAKAKTDNAKAKLTKEKDKFIKGVHSLASLEQAIEHHTARHDDESVQAGKLGQYFKHGLAGVDNPIQKIHNNHSTIKGFLERERPAGERALPKIKSGKNPEMTQLRQLKELLDNALNVAHFAKLLTTKTTLDNQDGNFYGEFGVLYDELAKIPTLYNKVRDYLSQKPFSTEKYKLNFGNPTLLNGWDLNKEKDNFGVILQKDGCYYLALLDKAHKKVFDNAPNTGKNVYQKMVYKLLPGPNKMLPKVFFAKSNLDYYNPSAELLDKYAKGTHKKGDNFNLKDCHALIDFFKAGINKHPEWQHFGFKFSPTSSYRDLSDFYREVEPQGYQVKFVDINADYIDELVEQGKLYLFQIYNKDFSPKAHGKPNLHTLYFKALFSEDNLADPIYKLNGEAQIFYRKASLDMNETTIHRAGEVLANKNPDNPKKRQFVYDIIKDKRYTQDKFMLHVPITMNFGVQGMTIKEFNKKVNQSIQQYDEVNVIGIDRGERHLLYLTVINSKGEILEQRSLNTIQQFDYQKKLDNREKERVAARQAWGEIETIKELKSGYLSHVVHQINQLMLKYNAIVVLEDLNFGFKRGRFKVEKQIYQNFENALIKKLNHLVLKDKADDEIGSYKNALQLTNNFTDLKSIGKQTGFLFYVPAWNTSKIDPETGFVDLLKPRYENIAQSQAFFGKFDKICYNTDKGYFEFHIDYAKFTDKAKNSRQKWAICSHGDKRYVYDKTANQNKGAAKGINVNDELKSLFARYHINDKQPNLVMDICQNNDKEFHKSLMCLLKTLLALRYSNASSDEDFILSPVANDEGVFFNSALADDTQPQNADANGAYHIALKGLWLLNELKNSDDLNKVKLAIDNQTWLNFAQNRGGGGSGGGGSGGGGSGGGGSGGGGSGGGGSPKKKRKVSGGSSGGSPKKKRKV

SEQ ID NO: 99 - protein, 1332 aa, synthetic construct
MPKKKRKVGGGGSGGGGSGGGGSGGGGSGGGGSGGGGSMLFQDFTHLYPLSKTVRFELKPIGRTLEHIHAKNFLSQDETMADMYQKVKVILDDYHRDFIADMMGEVKLTKLAEFYDVYLKFRKNPKDDGLQKQLKDLQAVLRKESVKPIGSGGKYKTGYDRLFGAKLFKDGKELGDLAKFVIAQEGESSPKLAHLAHFEKFSTYFTGFHRNRKNMYSDEDKHTAIAYRLIHENLPRFIDNLQILTTIKQKHSALYDQIINELTASGLDVSLASHLDGYHKLLTQEGITAYNRIIGEVNGYTNKHNQICHKSERIAKLRPLHKQILSDGMGVSFLPSKFADDSEMCQAVNEFYRHYTDVFAKVQSLFDGFDDHQKDGIYVEHKNLNELSKQAFGDFALLGRVLDGYYVDVVNPEFNERFAKAKTDNAKAKLTKEKDKFIKGVHSLASLEQAIEHHTARHDDESVQAGKLGQYFKHGLAGVDNPIQKIHNNHSTIKGFLERERPAGERALPKIKSGKNPEMTQLRQLKELLDNALNVAHFAKLLTTKTTLDNQDGNFYGEFGVLYDELAKIPTLYNKVRDYLSQKPFSTEKYKLNFGNPTLLNGWDLNKEKDNFGVILQKDGCYYLALLDKAHKKVFDNAPNTGKNVYQKMVYKLLPGPNKMLPKVFFAKSNLDYYNPSAELLDKYAKGTHKKGDNFNLKDCHALIDFFKAGINKHPEWQHFGFKFSPTSSYRDLSDFYREVEPQGYQVKFVDINADYIDELVEQGKLYLFQIYNKDFSPKAHGKPNLHTLYFKALFSEDNLADPIYKLNGEAQIFYRKASLDMNETTIHRAGEVLANKNPDNPKKRQFVYDIIKDKRYTQDKFMLHVPITMNFGVQGMTIKEFNKKVNQSIQQYDEVNVIGIDRGERHLLYLTVINSKGEILEQRSLNTIQQFDYQKKLDNREKERVAARQAWGEIETIKELKSGYLSHVVHQINQLMLKYNAIVVLEDLNFGFKRGRFKVEKQIYQNFENALIKKLNHLVLKDKADDEIGSYKNALQLTNNFTDLKSIGKQTGFLFYVPAWNTSKIDPETGFVDLLKPRYENIAQSQAFFGKFDKICYNTDKGYFEFHIDYAKFTDKAKNSRQKWAICSHGDKRYVYDKTANQNKGAAKGINVNDELKSLFARYHINDKQPNLVMDICQNNDKEFHKSLMCLLKTLLALRYSNASSDEDFILSPVANDEGVFFNSALADDTQPQNADANGAYHIALKGLWLLNELKNSDDLNKVKLAIDNQTWLNFAQNRGGGGSGGGGSGGGGSGGGGSGGGGSGGGGSPKKKRKVSGGSSGGSPKKKRKV

SEQ ID NO: 100 - protein, 1332 aa, synthetic construct
MPKKKRKVGGGGSGGGGSGGGGSGGGGSGGGGSGGGGSMLFQDFTHLYPLSKTVRFELKPIGRTLEHIHAKNFLSQDETMADMYQKVKVILDDYHRDFIADMMGEVKLTKLAEFYDVYLKFRKNPKDDGLQKQLKDLQAVLRKESVKPIGSGGKYKTGYDRLFGAKLFKDGKELGDLAKFVIAQEGESSPKLAHLAHFEKFSTYFTGFHDNRKNMYSDEDKHTAIAYRLIHENLPRFIDNLQILTTIKQKHSALYDQIINELTASGLDVSLASHLDGYHKLLTQEGITAYNRIIGEVNGYTNKHNQICHKSERIAKLRPLHKQILSDGMGVSFLPSKFADDSEMCQAVNEFYRHYTDVFAKVQSLFDGFDDHQKDGIYVEHKNLNELSKQAFGDWALLGRVLDGYYVDVVNPEFNERFAKAKTDNAKAKLTKEKDKFIKGVHSLASLEQAIEHHTARHDDESVQAGKLGQYFKHGLAGVDNPIQKIHNNHSTIKGFLERERPAGERALPKIKSGKNPEMTQLRQLKELLDNALNVAHFAKLLTTKTTLDNQDGNFYGEFGVLYDELAKIPTLYNKVRDYLSQKPFSTEKYKLNFGNPTLLNGWDLNKEKDNFGVILQKDGCYYLALLDKAHKKVFDNAPNTGKNVYQKMVYKLLPGPNKMLPKVFFAKSNLDYYNPSAELLDKYAKGTHKKGDNFNLKDCHALIDFFKAGINKHPEWQHFGFKFSPTSSYRDLSDFYREVEPQGYQVKFVDINADYIDELVEQGKLYLFQIYNKDFSPKAHGKPNLHTLYFKALFSEDNLADPIYKLNGEAQIFYRKASLDMNETTIHRAGEVLANKNPDNPKKRQFVYDIIKDKRYTQDKFMLHVPITMNFGVQGMTIKEFNKKVNQSIQQYDEVNVIGIDRGERHLLYLTVINSKGEILEQRSLNTIQQFDYQKKLDNREKERVAARQAWGEIETIKELKSGYLSHVVHQINQLMLKYNAIVVLEDLNFGFKRGRFKVEKQIYQNFENALIKKLNHLVLKDKADDEIGSYKNALQLTNNFTDLKSIGKQTGFLFYVPAWNTSKIDPETGFVDLLKPRYENIAQSQAFFGKFDKICYNTDKGYFEFHIDYAKFTDKAKNSRQKWAICSHGDKRYVYDKTANQNKGAAKGINVNDELKSLFARYHINDKQPNLVMDICQNNDKEFHKSLMCLLKTLLALRYSNASSDEDFILSPVANDEGVFFNSALADDTQPQNADANGAYHIALKGLWLLNELKNSDDLNKVKLAIDNQTWLNFAQNRGGGGSGGGGSGGGGSGGGGSGGGGSGGGGSPKKKRKVSGGSSGGSPKKKRKV

SEQ ID NO: 101 - protein, 1332 aa, synthetic construct
MPKKKRKVGGGGSGGGGSGGGGSGGGGSGGGGSGGGGSMLFQDFTHLYPLSKTVRFELKPIGRTLEHIHAKNFLSQDETMADMYQKVKVILDDYHRDFIADMMGEVKLTKLAEFYDVYLKFRKNPKDDGLQKQLKDLQAVLRKESVKPIGSGGKYKTGYDRLFGAKLFKDGKELGDLAKFVIAQEGESSPKLAHLAHFEKFSTYFTGFHRNRKNMYSDEDKHTAIAYRLIHENLPRFIDNLQILTTIKQKHSALYDQIINELTASGLDVSLASHLDGYHKLLTQEGITAYNRIIGEVNGYTNKHNQICHKSERIAKLRPLHKQILSDGMGVSFLPSKFADDSEMCQAVNEFYRHYTDVFAKVQSLFDGFDDHQKDGIYVEHKNLNELSKQAFGDWALLGRVLDGYYVDVVNPEFNERFAKAKTDNAKAKLTKEKDKFIKGVHSLASLEQAIEHHTARHDDESVQAGKLGQYFKHGLAGVDNPIQKIHNNHSTIKGFLERERPAGERALPKIKSGKNPEMTQLRQLKELLDNALNVAHFAKLLTTKTTLDNQDGNFYGEFGVLYDELAKIPTLYNKVRDYLSQKPFSTEKYKLNFGNPTLLNGWDLNKEKDNFGVILQKDGCYYLALLDKAHKKVFDNAPNTGKNVYQKMVYKLLPGPNKMLPKVFFAKSNLDYYNPSAELLDKYAKGTHKKGDNFNLKDCHALIDFFKAGINKHPEWQHFGFKFSPTSSYRDLSDFYREVEPQGYQVKFVDINADYIDELVEQGKLYLFQIYNKDFSPKAHGKPNLHTLYFKALFSEDNLADPIYKLNGEAQIFYRKASLDMNETTIHRAGEVLANKNPDNPKKRQFVYDIIKDKRYTQDKFMLHVPITMNFGVQGMTIKEFNKKVNQSIQQYDEVNVIGIDRGERHLLYLTVINSKGEILEQRSLNTIQQFDYQKKLDNREKERVAARQAWGEIETIKELKSGYLSHVVHQINQLMLKYNAIVVLEDLNFGFKRGRFKVEKQIYQNFENALIKKLNHLVLKDKADDEIGSYKNALQLTNNFTDLKSIGKQTGFLFYVPAWNTSKIDPETGFVDLLKPRYENIAQSQAFFGKFDKICYNTDKGYFEFHIDYAKFTDKAKNSRQKWAICSHGDKRYVYDKTANQNKGAAKGINVNDELKSLFARYHINDKQPNLVMDICQNNDKEFHKSLMCLLKTLLALRYSNASSDEDFILSPVANDEGVFFNSALADDTQPQNADANGAYHIALKGLWLLNELKNSDDLNKVKLAIDNQTWLNFAQNRGGGGSGGGGSGGGGSGGGGSGGGGSGGGGSPKKKRKVSGGSSGGSPKKKRKV

SEQ ID NO: 102 - protein, 1341 aa, synthetic construct
MPKKKRKVGGGGSGGGGSGGGGSGGGGSGGGGSGGGGSMLFQDFTHLYPLSKTVRFELKPIGRTLEHIHAKNFLSQDETMADMYQKVKVILDDYHRDFIADMMGEVKLTKLAEFYDVYLKFRKNPKDDGLQKQLKDLQAVLRKESVKPIGSGGKYKTGYDRLFGAKLFKDGKELGDLAKFVIAQEGESSPKLAHLAHFEKFSTYFTGFHDNRKNMYSDEDKHTAIAYRLIHENLPRFIDNLQILTTIKQKHSALYDQIINELTASGLDVSLASHLDGYHKLLTQEGITAYNRIIGEVNGYTNKHNQICHKSERIAKLRPLHKQILSDGMGVSFLPSKFADDSEMCQAVNEFYRHYTDVFAKVQSLFDGFDDHQKDGIYVEHKNLNELSKQAFGDFALLGRVLDGYYVDVVNPEFNERFAKAKTDNAKAKLTKEKDKFIKGVHSLASLEQAIEHHTARHDDESVQAGKLGQYFKHGLAGVDNPIQKIHNNHSTIKGFLERERPAGERALPKIKSGKNPEMTQLRQLKELLDNALNVAHFAKLLTTKTTLDNQDGNFYGEFGVLYDELAKIPTLYNKVRDYLSQKPFSTEKYKLNFGNPTLLNGWDLNKEKDNFGVILQKDGCYYLALLDKAHKKVFDNAPNTGKNVYQKMVYKLLPGPNKMLPKVFFAKSNLDYYNPSAELLDKYAKGTHKKGDNFNLKDCHALIDFFKAGINKHPEWQHFGFKFSPTSSYRDLSDFYREVEPQGYQVKFVDINADYIDELVEQGKLYLFQIYNKDFSPKAHGKPNLHTLYFKALFSEDNLADPIYKLNGEAQIFYRKASLDMNETTIHRAGEVLANKNPDNPKKRQFVYDIIKDKRYTQDKFMLHVPITMNFGVQGMTIKEFNKKVNQSIQQYDEVNVIGIDRGERHLLYLTVINSKGEILEQRSLNDITTASANGTQVTTPYHKILDKREIERLNARKGWGEIETIKELKSGYLSHVVHQINQLMLKYNAIVVLEDLNFGFKRGRFKVEKQIYQNFENALIKKLNHLVLKDKADDEIGSYKNALQLTNNFTDLKSIGKQTGFLFYVPAWNTSKIDPETGFVDLLKPRYENIAQSQAFFGKFDKICYNTDKGYFEFHIDYAKFTDKAKNSRQKWAICSHGDKRYVYDKTANQNKGAAKGINVNDELKSLFARYHINDKQPNLVMDICQNNDKEFHKSLMCLLKTLLALRYSNASSDEDFILSPVANDEGVFFNSALADDTQPQNADANGAYHIALKGLWLLNELKNSDDLNKVKLAIDNQTWLNFAQNRGGGGSGGGGSGGGGSGGGGSGGGGSGGGGSPKKKRKVSGGSSGGSPKKKRKV

SEQ ID NO: 103 - protein, 1341 aa, synthetic construct
MPKKKRKVGGGGSGGGGSGGGGSGGGGSGGGGSGGGGSMLFQDFTHLYPLSKTVRFELKPIGRTLEHIHAKNFLSQDETMADMYQKVKVILDDYHRDFIADMMGEVKLTKLAEFYDVYLKFRKNPKDDGLQKQLKDLQAVLRKESVKPIGSGGKYKTGYDRLFGAKLFKDGKELGDLAKFVIAQEGESSPKLAHLAHFEKFSTYFTGFHRNRKNMYSDEDKHTAIAYRLIHENLPRFIDNLQILTTIKQKHSALYDQIINELTASGLDVSLASHLDGYHKLLTQEGITAYNRIIGEVNGYTNKHNQICHKSERIAKLRPLHKQILSDGMGVSFLPSKFADDSEMCQAVNEFYRHYTDVFAKVQSLFDGFDDHQKDGIYVEHKNLNELSKQAFGDFALLGRVLDGYYVDVVNPEFNERFAKAKTDNAKAKLTKEKDKFIKGVHSLASLEQAIEHHTARHDDESVQAGKLGQYFKHGLAGVDNPIQKIHNNHSTIKGFLERERPAGERALPKIKSGKNPEMTQLRQLKELLDNALNVAHFAKLLTTKTTLDNQDGNFYGEFGVLYDELAKIPTLYNKVRDYLSQKPFSTEKYKLNFGNPTLLNGWDLNKEKDNFGVILQKDGCYYLALLDKAHKKVFDNAPNTGKNVYQKMVYKLLPGPNKMLPKVFFAKSNLDYYNPSAELLDKYAKGTHKKGDNFNLKDCHALIDFFKAGINKHPEWQHFGFKFSPTSSYRDLSDFYREVEPQGYQVKFVDINADYIDELVEQGKLYLFQIYNKDFSPKAHGKPNLHTLYFKALFSEDNLADPIYKLNGEAQIFYRKASLDMNETTIHRAGEVLANKNPDNPKKRQFVYDIIKDKRYTQDKFMLHVPITMNFGVQGMTIKEFNKKVNQSIQQYDEVNVIGIDRGERHLLYLTVINSKGEILEQRSLNDITTASANGTQVTTPYHKILDKREIERLNARKGWGEIETIKELKSGYLSHVVHQINQLMLKYNAIVVLEDLNFGFKRGRFKVEKQIYQNFENALIKKLNHLVLKDKADDEIGSYKNALQLTNNFTDLKSIGKQTGFLFYVPAWNTSKIDPETGFVDLLKPRYENIAQSQAFFGKFDKICYNTDKGYFEFHIDYAKFTDKAKNSRQKWAICSHGDKRYVYDKTANQNKGAAKGINVNDELKSLFARYHINDKQPNLVMDICQNNDKEFHKSLMCLLKTLLALRYSNASSDEDFILSPVANDEGVFFNSALADDTQPQNADANGAYHIALKGLWLLNELKNSDDLNKVKLAIDNQTWLNFAQNRGGGGSGGGGSGGGGSGGGGSGGGGSGGGGSPKKKRKVSGGSSGGSPKKKRKV

SEQ ID NO: 104 - protein, 1341 aa, synthetic construct
MPKKKRKVGGGGSGGGGSGGGGSGGGGSGGGGSGGGGSMLFQDFTHLYPLSKTVRFELKPIGRTLEHIHAKNFLSQDETMADMYQKVKVILDDYHRDFIADMMGEVKLTKLAEFYDVYLKFRKNPKDDGLQKQLKDLQAVLRKESVKPIGSGGKYKTGYDRLFGAKLFKDGKELGDLAKFVIAQEGESSPKLAHLAHFEKFSTYFTGFHDNRKNMYSDEDKHTAIAYRLIHENLPRFIDNLQILTTIKQKHSALYDQIINELTASGLDVSLASHLDGYHKLLTQEGITAYNRIIGEVNGYTNKHNQICHKSERIAKLRPLHKQILSDGMGVSFLPSKFADDSEMCQAVNEFYRHYTDVFAKVQSLFDGFDDHQKDGIYVEHKNLNELSKQAFGDWALLGRVLDGYYVDVVNPEFNERFAKAKTDNAKAKLTKEKDKFIKGVHSLASLEQAIEHHTARHDDESVQAGKLGQYFKHGLAGVDNPIQKIHNNHSTIKGFLERERPAGERALPKIKSGKNPEMTQLRQLKELLDNALNVAHFAKLLTTKTTLDNQDGNFYGEFGVLYDELAKIPTLYNKVRDYLSQKPFSTEKYKLNFGNPTLLNGWDLNKEKDNFGVILQKDGCYYLALLDKAHKKVFDNAPNTGKNVYQKMVYKLLPGPNKMLPKVFFAKSNLDYYNPSAELLDKYAKGTHKKGDNFNLKDCHALIDFFKAGINKHPEWQHFGFKFSPTSSYRDLSDFYREVEPQGYQVKFVDINADYIDELVEQGKLYLFQIYNKDFSPKAHGKPNLHTLYFKALFSEDNLADPIYKLNGEAQIFYRKASLDMNETTIHRAGEVLANKNPDNPKKRQFVYDIIKDKRYTQDKFMLHVPITMNFGVQGMTIKEFNKKVNQSIQQYDEVNVIGIDRGERHLLYLTVINSKGEILEQRSLNDITTASANGTQVTTPYHKILDKREIERLNARKGWGEIETIKELKSGYLSHVVHQINQLMLKYNAIVVLEDLNFGFKRGRFKVEKQIYQNFENALIKKLNHLVLKDKADDEIGSYKNALQLTNNFTDLKSIGKQTGFLFYVPAWNTSKIDPETGFVDLLKPRYENIAQSQAFFGKFDKICYNTDKGYFEFHIDYAKFTDKAKNSRQKWAICSHGDKRYVYDKTANQNKGAAKGINVNDELKSLFARYHINDKQPNLVMDICQNNDKEFHKSLMCLLKTLLALRYSNASSDEDFILSPVANDEGVFFNSALADDTQPQNADANGAYHIALKGLWLLNELKNSDDLNKVKLAIDNQTWLNFAQNRGGGGSGGGGSGGGGSGGGGSGGGGSGGGGSPKKKRKVSGGSSGGSPKKKRKV

SEQ ID NO: 105 - protein, 1341 aa, synthetic construct
MPKKKRKVGGGGSGGGGSGGGGSGGGGSGGGGSGGGGSMLFQDFTHLYPLSKTVRFELKPIGRTLEHIHAKNFLSQDETMADMYQKVKVILDDYHRDFIADMMGEVKLTKLAEFYDVYLKFRKNPKDDGLQKQLKDLQAVLRKESVKPIGSGGKYKTGYDRLFGAKLFKDGKELGDLAKFVIAQEGESSPKLAHLAHFEKFSTYFTGFHRNRKNMYSDEDKHTAIAYRLIHENLPRFIDNLQILTTIKQKHSALYDQIINELTASGLDVSLASHLDGYHKLLTQEGITAYNRIIGEVNGYTNKHNQICHKSERIAKLRPLHKQILSDGMGVSFLPSKFADDSEMCQAVNEFYRHYTDVFAKVQSLFDGFDDHQKDGIYVEHKNLNELSKQAFGDWALLGRVLDGYYVDVVNPEFNERFAKAKTDNAKAKLTKEKDKFIKGVHSLASLEQAIEHHTARHDDESVQAGKLGQYFKHGLAGVDNPIQKIHNNHSTIKGFLERERPAGERALPKIKSGKNPEMTQLRQLKELLDNALNVAHFAKLLTTKTTLDNQDGNFYGEFGVLYDELAKIPTLYNKVRDYLSQKPFSTEKYKLNFGNPTLLNGWDLNKEKDNFGVILQKDGCYYLALLDKAHKKVFDNAPNTGKNVYQKMVYKLLPGPNKMLPKVFFAKSNLDYYNPSAELLDKYAKGTHKKGDNFNLKDCHALIDFFKAGINKHPEWQHFGFKFSPTSSYRDLSDFYREVEPQGYQVKFVDINADYIDELVEQGKLYLFQIYNKDFSPKAHGKPNLHTLYFKALFSEDNLADPIYKLNGEAQIFYRKASLDMNETTIHRAGEVLANKNPDNPKKRQFVYDIIKDKRYTQDKFMLHVPITMNFGVQGMTIKEFNKKVNQSIQQYDEVNVIGIDRGERHLLYLTVINSKGEILEQRSLNDITTASANGTQVTTPYHKILDKREIERLNARKGWGEIETIKELKSGYLSHVVHQINQLMLKYNAIVVLEDLNFGFKRGRFKVEKQIYQNFENALIKKLNHLVLKDKADDEIGSYKNALQLTNNFTDLKSIGKQTGFLFYVPAWNTSKIDPETGFVDLLKPRYENIAQSQAFFGKFDKICYNTDKGYFEFHIDYAKFTDKAKNSRQKWAICSHGDKRYVYDKTANQNKGAAKGINVNDELKSLFARYHINDKQPNLVMDICQNNDKEFHKSLMCLLKTLLALRYSNASSDEDFILSPVANDEGVFFNSALADDTQPQNADANGAYHIALKGLWLLNELKNSDDLNKVKLAIDNQTWLNFAQNRGGGGSGGGGSGGGGSGGGGSGGGGSGGGGSPKKKRKVSGGSSGGSPKKKRKV

SEQ ID NO: 106 - protein, 1332 aa, synthetic construct
MPKKKRKVGGGGSGGGGSGGGGSGGGGSGGGGSGGGGSMLFQDFTHLYPLSKTVRFELKPIGRTLEHIHAKNFLSQDETMADMYQKVKVILDDYHRDFIADMMGEVKLTKLAEFYDVYLKFRKNPKDDGLQKQLKDLQAVLRKESVKPIGSGGKYKTGYDRLFGAKLFKDGKELGDLAKFVIAQEGESSPKLAHLAHFEKFSTYFTGFHDNRKNMYSDEDKHTAIAYRLIHENLPRFIDNLQILTTIKQKHSALYDQIINELTASGLDVSLASHLDGYHKLLTQEGITAYNRIIGEVNGYTNKHNQICHKSERIAKLRPLHKQILSDGMGVSFLPSKFADDSEMCQAVNEFYRHYTDVFAKVQSLFDGFDDHQKDGIYVEHKNLNELSKQAFGDWALLGRVLDGYYVDVVNPEFNERFAKAKTDNAKAKLTKEKDKFIKGVHSLASLEQAIEHHTARHDDESVQAGKLGQYFKHGLAGVDNPIQKIHNNHSTIKGFLERERPAGERALPKIKSGKNPEMTQLRQLKELLDNALNVAHFAKLLTTKTTLDNQDGNFYGEFGVLYDELAKIPTLYNKVRDYLSQKPFSTEKYKLNFGNPTLLNGWDLNKEKDNFGVILQKDGCYYLALLDKAHKKVFDNAPNTGKNVYQKMVYKLLPGPNKMLPKVFFAKSNLDYYNPSAELLDKYAKGTHKKGDNFNLKDCHALIDFFKAGINKHPEWQHFGFKFSPTSSYRDLSDFYREVEPQGYQVKFVDINADYIDELVEQGKLYLFQIYNKDFSPKAHGKPNLHTLYFKALFSEDNLADPIYKLNGEAQIFYRKASLDMNETTIHRAGEVLANKNPDNPKKRQFVYDIIKDKRYTQDKFMLHVPITMNFGVQGMTIKEFNKKVNQSIQQYDEVNVIGIDRGERHLLYLTVINSKGEILEQRSLNTIQQFDYQKKLDNREKERVAARQAWGEIETIKELKSGYLSHVVHQINQLMLKYNAIVVLEDLNFGFKRGRFKVEKQIYQNFENALIKKLNHLVLKDKADDEIGSYKNALQLTNNFTDLKSIGKQTGFLFYVPAWNTSKIDPETGFVDLLKPRYENIAQSQAFFGKFDKICYNTDKGYFEFHIDYAKFTDKAKNSRQKWAICSHGDKRYVYDKTANQNKGAAKGINVNDELKSLFARYHINDKQPNLVMDICQNNDKEFHKSLMCLLKTLLQMRNSNAATGEDYILSPVANDEGVFFNSALADDTQPQNADANGAYHIALKGLWLLNELKNSDDLNKVKLAIDNQTWLNFAQNRGGGGSGGGGSGGGGSGGGGSGGGGSGGGGSPKKKRKVSGGSSGGSPKKKRKV

SEQ ID NO: 107 - protein, 1332 aa, synthetic construct
MPKKKRKVGGGGSGGGGSGGGGSGGGGSGGGGSGGGGSMLFQDFTHLYPLSKTVRFELKPIGRTLEHIHAKNFLSQDETMADMYQKVKVILDDYHRDFIADMMGEVKLTKLAEFYDVYLKFRKNPKDDGLQKQLKDLQAVLRKESVKPIGSGGKYKTGYDRLFGAKLFKDGKELGDLAKFVIAQEGESSPKLAHLAHFEKFSTYFTGFHRNRKNMYSDEDKHTAIAYRLIHENLPRFIDNLQILTTIKQKHSALYDQIINELTASGLDVSLASHLDGYHKLLTQEGITAYNRIIGEVNGYTNKHNQICHKSERIAKLRPLHKQILSDGMGVSFLPSKFADDSEMCQAVNEFYRHYTDVFAKVQSLFDGFDDHQKDGIYVEHKNLNELSKQAFGDWALLGRVLDGYYVDVVNPEFNERFAKAKTDNAKAKLTKEKDKFIKGVHSLASLEQAIEHHTARHDDESVQAGKLGQYFKHGLAGVDNPIQKIHNNHSTIKGFLERERPAGERALPKIKSGKNPEMTQLRQLKELLDNALNVAHFAKLLTTKTTLDNQDGNFYGEFGVLYDELAKIPTLYNKVRDYLSQKPFSTEKYKLNFGNPTLLNGWDLNKEKDNFGVILQKDGCYYLALLDKAHKKVFDNAPNTGKNVYQKMVYKLLPGPNKMLPKVFFAKSNLDYYNPSAELLDKYAKGTHKKGDNFNLKDCHALIDFFKAGINKHPEWQHFGFKFSPTSSYRDLSDFYREVEPQGYQVKFVDINADYIDELVEQGKLYLFQIYNKDFSPKAHGKPNLHTLYFKALFSEDNLADPIYKLNGEAQIFYRKASLDMNETTIHRAGEVLANKNPDNPKKRQFVYDIIKDKRYTQDKFMLHVPITMNFGVQGMTIKEFNKKVNQSIQQYDEVNVIGIDRGERHLLYLTVINSKGEILEQRSLNTIQQFDYQKKLDNREKERVAARQAWGEIETIKELKSGYLSHVVHQINQLMLKYNAIVVLEDLNFGFKRGRFKVEKQIYQNFENALIKKLNHLVLKDKADDEIGSYKNALQLTNNFTDLKSIGKQTGFLFYVPAWNTSKIDPETGFVDLLKPRYENIAQSQAFFGKFDKICYNTDKGYFEFHIDYAKFTDKAKNSRQKWAICSHGDKRYVYDKTANQNKGAAKGINVNDELKSLFARYHINDKQPNLVMDICQNNDKEFHKSLMCLLKTLLQMRNSNAATGEDYILSPVANDEGVFFNSALADDTQPQNADANGAYHIALKGLWLLNELKNSDDLNKVKLAIDNQTWLNFAQNRGGGGSGGGGSGGGGSGGGGSGGGGSGGGGSPKKKRKVSGGSSGGSPKKKRKV

SEQ ID NO: 108 - DNA, 17504 bp, synthetic construct
  source 1..17504: mol_type = other DNA
attcctgtggttggcatgcacatacaaatggacgaacggataaaccttttcacgcccttttaaatatccgattattctaataaacgctcttttctcttaggtttacccgccaatatatcctgtcaaacactgatagtttaaactggcactagcctaacggtgttgactaactaggccgcttccctaattagctaacccgggggcgcgccgggaccggaattcattatgtggtctaggtaggttctatatataagaaaacttgaaatgttctaaaaaaaaattcaagcccatgcatgattgaagcaaacggtatagcaacggtgttaacctgatctagtgatctcttgcaatccttaacggccacctaccgcaggtagcaaacggcgtccccctcctcgatatctccgcggcgacctctggctttttccgcggaattgcgcggtggggacggattccacgagaccgcgacgcaaccgcctctcgccgctgggccccacaccgctcggtgccgtagcctcacgggactctttctccctcctcccccgttataaattggcttcatcccctccttgcctcatccatccaaatcccagtccccaatcccatcccttcgtaggagaaattcatcgaagctaagcgaatcctcgcgatcctctcaaggtactgcgagttttcgatccccctctcgacccctcgtatgtttgtgtttgtcgtagcgtttgattaggtatgctttccctgtttgtgttcgtcgtagcgtttgattaggtatgctttccctgttcgtgttcatcgtagtgtttgattaggtcgtgtgaggcgatggcctgctcgcgtccttcgatctgtagtcgatttgcgggtcgtggtgtagatctgcgggctgtgatgaagttatttggtgtgatctgctcgcctgattctgcgggttggctcgagtagatatgatggttggaccggttggttcgtttaccgcgctagggttgggctgggatgatgttgcatgcgccgttgcgcgtgatcccgcagcaggacttgcgtttgattgccagatctcgttacgattatgtgatttggtttggactttttagatctgtagcttctgcttatgtgccagatgcgcctactgctcatatgcctgatgataatcataaatggctgtggaactaactagttgattgcggagtcatgtatcagctacaggtgtagggactagctacaggtgtagggacttgcgtctaattgtttggtcctttactcatgttgcaattatgcaatttagtttagattgtttgttccactcatctaggctgtaaaagggacactgcttagattgctgtttaatctttttagtagattatattatattggtaacttattacccctattacatgccatacgtgacttctgctcatgcctgatgataatcatagatcactgtggaattaattagttgattgttgaatcatgtttcatgtacataccacggcacaattgcttagttccttaacaaatgcaaattttactgatccatgtatgatttgcgtggttctctaatgtgaaatactatagctacttgttagtaagaatcaggttcgtatgcttaatgctgtatgtgccttctgctcatgcctgatgataatcatatatcactggaattaattagttgatcgtttaatcatatatcaagtacataccatgccacaatttttagtcacttaacccatgcagattgaactggtccctgcatgttttgctaaattgttctattctgattagaccatatatcatgtatttttttttggtaatggttctcttattttaaatgctatatagttctggtacttgttagaaagatctgcttcatagtttagttgcctatccctcgaattaggatgctgagcagctgatcctatagctttgtttcatgtatcaattcttttgtgttcaacagtcagtttttgttagattcattgtaacttatggtcgcttactcttctggtcctcaatgcttgcagggatcccctaaatagaccatgccgaagaagaagcgcaaggtcgggggcgggggctcaggcgggggcgggagcggcggcgggggctctgggggcggcggcagcggcgggggcggcagcgggggcggcgggtcgatgctgttccaggatttcactcatctgtaccctctctcaaagactgttcggttcgagctcaagcctattgggcggactctggagcacatccacgcgaagaacttcctcagccaggacgaaaccatggccgacatgtaccagaaggtcaaggtcatcctcgacgactaccacagggacttcatcgcggacatgatgggcgaggtgaagctgacgaagctcgccgagttctacgacgtctacctcaagttccgcaagaacccgaaggacgacggcctccagaagcagctcaaggacctgcaggccgtcctgaggaaggagtccgtcaagcccatcggcagcggcggcaagtacaagaccggctacgacaggctgttcggcgccaagctgttcaaggacggcaaggagctcggcgacctggcgaagttcgtgatcgcgcaggagggcgagagctcccccaagctggcccacctggcccacttcgagaagttcagcacgtacttcaccggcttccacaggaacaggaagaacatgtacagcgacgaggacaagcacacggccatcgcctaccgcctcatccacgagaacctgccccgcttcatcgacaacctgcagatcctgacgaccatcaagcagaagcactccgccctgtacgaccagatcatcaacgagctcaccgcgagcggcctcgacgtgtccctcgccagccacctcgacggctaccacaagctcctgacccaggagggcatcaccgcctacaaccgcatcatcggcgaggtgaacggctacaccaacaagcacaaccagatctgccacaagtccgagaggatcgccaagctcaggcccctgcacaagcagatcctcagcgacggcatgggcgtgagcttcctcccgtccaagttcgccgacgactccgagatgtgccaggccgtgaacgagttctacaggcactacaccgacgtgttcgccaaggtgcagtccctgttcgacggcttcgacgaccaccagaaggacggcatctacgtggagcacaagaacctgaacgagctgtccaagcaggccttcggcgacttcgccctcctgggccgcgtgctggacggctactacgtggacgtcgtgaacccggagttcaacgagcgcttcgcgaaggcgaagacggacaacgcgaaggccaagctcaccaaggagaaggacaagttcatcaagggcgtccacagcctcgcgtccctggagcaggcgatcgagcaccacaccgcgcgccacgacgacgagtccgtgcaggccggcaagctcggccagtacttcaagcacggcctggccggcgtcgacaacccgatccagaagatccacaacaaccactccaccatcaagggcttcctggagagggagcgcccggcgggcgagcgcgcgctccccaagatcaagtccggcaagaaccccgagatgacgcagctcaggcagctgaaggagctgctcgacaacgcgctcaacgtggcgcacttcgccaagctgctcacgaccaagaccacgctggacaaccaggacggcaacttctacggcgagttcggcgtcctgtacgacgagctggcgaagatcccgaccctgtacaacaaggtccgcgactacctgagccagaagcccttctccaccgagaagtacaagctcaacttcggcaacccgaccctcctgaacggctgggacctcaacaaggagaaggacaacttcggcgtgatcctccagaaggacggctgctactacctcgccctgctggacaaggcgcacaagaaggtcttcgacaacgccccgaacaccggcaagaacgtgtaccagaagatggtgtacaagctgctccccggccccaacaagatgctgccgaaggtgttcttcgcgaagtccaacctcgactactacaaccccagcgccgagctcctggacaagtacgccaagggcacgcacaagaagggcgacaacttcaacctcaaggactgccacgcgctgatcgacttcttcaaggcgggcatcaacaagcaccccgagtggcagcacttcggcttcaagttcagcccgacctccagctacagggacctcagcgacttctaccgcgaggtggagccccagggctaccaggtgaagttcgtcgacatcaacgccgactacatcgacgagctcgtcgagcagggcaagctctacctgttccagatctacaacaaggacttctccccgaaggcccacggcaagccgaacctccacacgctctacttcaaggccctcttcagcgaggacaacctggccgacccgatctacaagctcaacggcgaggcgcagatcttctaccgcaaggccagcctggacatgaacgaaacgaccatccacagggccggcgaggtcctggagaacaagaacccggacaacccgaagaagaggcagttcgtctacgacatcatcaaggacaagaggtacacccaggacaagttcatgctccacgtcccgatcaccatgaacttcggcgtccagggcatgaccatcaaggagttcaacaagaaggtcaaccagagcatccagcagtacgacgaggtgaacgtcatcggcatcgaccgcggcgagaggcacctgctctacctgacggtcatcaactccaagggcgagatcctcgagcagcgcagcctgaacaccatccagcagttcgactaccagaagaagctggacaacagggagaaggagagggtggccgcccgccaggcctggggcgagatcgaaacgatcaaggagctcaagtccggctacctcagccacgtcgtgcaccagatcaaccagctcatgctgaagtacaacgcgatcgtggtcctcgaggacctgaacttcggcttcaagaggggccgcttcaaggtggagaagcagatctaccagaacttcgagaacgccctgatcaagaagctcaaccacctggtcctcaaggacaaggcggacgacgagatcggcagctacaagaacgcgctccagctgaccaacaacttcacggacctcaagtccatcggcaagcagacgggcttcctgttctacgtgccggcgtggaacacctccaagatcgacccggaaaccggcttcgtcgacctgctcaagccgcgctacgagaacatcgcgcagtcccaggcgttcttcggcaagttcgacaagatctgctacaacaccgacaagggctacttcgagttccacatcgactacgcgaagttcaccgacaaggccaagaactccaggcagaagtgggccatctgcagccacggcgacaagcgctacgtgtacgacaagacggcgaaccagaacaagggcgcggccaagggcatcaacgtgaacgacgagctgaagtccctcttcgcgcgctaccacatcaacgacaagcagccgaacctcgtcatggacatctgccagaacaacgacaaggagttccacaagagcctgatgtgcctgctcaagaccctgctcgccctccgctactccaacgcgagctccgacgaggacttcatcctcagccccgtcgcgaacgacgagggcgtgttcttcaactccgccctcgcggacgacacgcagccgcagaacgccgacgcgaacggcgcctaccacatcgccctcaagggcctgtggctgctcaacgagctcaagaactccgacgacctgaacaaggtgaagctcgccattgacaaccagacgtggctgaatttcgctcagaatagggggggcgggggctcaggcgggggcgggagcggcggcgggggctctgggggcggcggcagcggcgggggcggcagcgggggcggcgggtcgccgaagaagaagcgcaaggtgtccggcggcagctccggcggcagcccgaagaagaagcgcaaagtgtgagggacccgatcgttcaaacatttggcaataaagtttcttaagattgaatcctgttgccggtcttgcgatgattatcatataatttctgttgaattacgttaagcatgtaataattaacatgtaatgcatgacgttatttatgagatgggtttttatgattagagtcccgcaattatacatttaatacgcgatagaaaacaaaatatagcgcgcaaactaggataaattatcgcgcgcggtgtcatctatgttactagatcggtaccgaattcattatgtggtctaggtaggttctatatataagaaaacttgaaatgttctaaaaaaaaattcaagcccatgcatgattgaagcaaacggtatagcaacggtgttaacctgatctagtgatctcttgcaatccttaacggccacctaccgcaggtagcaaacggcgtccccctcctcgatatctccgcggcgacctctggctttttccgcggaattgcgcggtggggacggattccacgagaccgcgacgcaaccgcctctcgccgctgggccccacaccgctcggtgccgtagcctcacgggactctttctccctcctcccccgttataaattggcttcatcccctccttgcctcatccatccaaatcccagtccccaatcccatcccttcgtaggagaaattcatcgaagctaagcgaatcctcgcgatcctctcaaggtactgcgagttttcgatccccctctcgacccctcgtatgtttgtgtttgtcgtagcgtttgattaggtatgctttccctgtttgtgttcgtcgtagcgtttgattaggtatgctttccctgttcgtgttcatcgtagtgtttgattaggtcgtgtgaggcgatggcctgctcgcgtccttcgatctgtagtcgatttgcgggtcgtggtgtagatctgcgggctgtgatgaagttatttggtgtgatctgctcgcctgattctgcgggttggctcgagtagatatgatggttggaccggttggttcgtttaccgcgctagggttgggctgggatgatgttgcatgcgccgttgcgcgtgatcccgcagcaggacttgcgtttgattgccagatctcgttacgattatgtgatttggtttggactttttagatctgtagcttctgcttatgtgccagatgcgcctactgctcatatgcctgatgataatcataaatggctgtggaactaactagttgattgcggagtcatgtatcagctacaggtgtagggactagctacaggtgtagggacttgcgtctaattgtttggtcctttactcatgttgcaattatgcaatttagtttagattgtttgttccactcatctaggctgtaaaagggacactgcttagattgctgtttaatctttttagtagattatattatattggtaacttattacccctattacatgccatacgtgacttctgctcatgcctgatgataatcatagatcactgtggaattaattagttgattgttgaatcatgtttcatgtacataccacggcacaattgcttagttccttaacaaatgcaaattttactgatccatgtatgatttgcgtggttctctaatgtgaaatactatagctacttgttagtaagaatcaggttcgtatgcttaatgctgtatgtgccttctgctcatgcctgatgataatcatatatcactggaattaattagttgatcgtttaatcatatatcaagtacataccatgccacaatttttagtcacttaacccatgcagattgaactggtccctgcatgttttgctaaattgttctattctgattagaccatatatcatgtatttttttttggtaatggttctcttattttaaatgctatatagttctggtacttgttagaaagatctgcttcatagtttagttgcctatccctcgaattaggatgctgagcagctgatcctatagctttgtttcatgtatcaattcttttgtgttcaacagtcagtttttgttagattcattgtaacttatggtcgcttactcttctggtcctcaatgcttgcagaagcttgaaattctgatgagtccgtgaggacgaaacgagtaagctcgtcaatttctactgtttgtagatgggaaagaccgaggagaagatctaatttctactgtttgtagatgcaccaaggaaggggaggagatcaatttctactgtttgtagatgtcacagatcacaaacttcaaatgaatttctactgtttgtagatacgcccagaaagcatacgcagtcggccggcatggtcccagcctcctcgctggcgccggctgggcaacatgcttcggcatggcgaatgggacgatcgttcaaacatttggcaataaagtttcttaagattgaatcctgttgccggtcttgcgatgattatcatataatttctgttgaattacgttaagcatgtaataattaacatgtaatgcatgacgttatttatgagatgggtttttatgattagagtcccgcaattatacatttaatacgcgatagaaaacaaaatatagcgcgcaaactaggataaattatcgcgcgcggtgtcatctatgttactagatccctaggctgcagtgcagcgtgacccggtcgtgcccctctctagagataatgagcattgcatgtctaagttataaaaaattaccacatattttttttgtcacacttgtttgaagtgcagtttatctatctttatacatatatttaaactttactctacgaataatataatctatagtactacaataatatcagtgttttagagaatcatataaatgaacagttagacatggtctaaaggacaattgagtattttgacaacaggactctacagttttatctttttagtgtgcatgtgttctcctttttttttgcaaatagcttcacctatataatacttcatccattttattagtacatccatttagggtttagggttaatggtttttatagactaatttttttagtacatctattttattctattttagcctctaaattaagaaaactaaaactctattttagtttttttatttaataatttagatataaaatagaataaaataaagtgactaaaaattaaacaaataccctttaagaaattaaaaaaactaaggaaacatttttcttgtttcgagtagataatgccagcctgttaaacgccgtcgacgagtctaacggacaccaaccagcgaaccagcagcgtcgcgtcgggccaagcgaagcagacggcacggcatctctgtcgctgcctctggacccctctcgagagttccgctccaccgttggacttgctccgctgtcggcatccagaaattgcgtggcggagcggcagacgtgagccggcacggcaggcggcctcctcctcctctcacggcaccggcagctacgggggattcctttcccaccgctccttcgctttcccttcctcgcccgccgtaataaatagacaccccctccacaccctctttccccaacctcgtgttgttcggagcgcacacacacacaaccagatctcccccaaatccacccgtcggcacctccgcttcaaggtacgccgctcgtcctccccccccccccctctctaccttctctagatcggcgttccggtccatggttagggcccggtagttctacttctgttcatgtttgtgttagatccgtgtttgtgttagatccgtgctgctagcgttcgtacacggatgcgacctgtacgtcagacacgttctgattgctaacttgccagtgtttctctttggggaatcctgggatggctctagccgttccgcagacgggatcgatttcatgattttttttgtttcgttgcatagggtttggtttgcccttttcctttatttcaatatatgccgtgcacttgtttgtcgggtcatcttttcatgcttttttttgtcttggttgtgatgatgtggtctggttgggcggtcgttctagatcggagtagaattctgtttcaaactacctggtggatttattaattttggatctgtatgtgtgtgccatacatattcatagttacgaattgaagatgatggatggaaatatcgatctaggataggtatacatgttgatgcgggttttactgatgcatatacagagatgctttttgttcgcttggttgtgatgatgtggtgtggttgggcggtcgttcattcgttctagatcggagtagaatactgtttcaaactacctggtgtatttattaattttggaactgtatgtgtgtgtcatacatcttcatagttacgagtttaagatggatggaaatatcgatctaggataggtatacatgttgatgtgggttttactgatgcatatacatgatggcatatgcagcatctattcatatgctctaaccttgagtacctatctattataataaacaagtatgttttataattattttgatcttgatatacttggatgatggcatatgcagcagctatatgtggatttttttagccctgccttcatacgctatttatttgcttggtactgtttcttttgtcgatgctcaccctgttgtttggtgttacttctgcagggatcaccgatcatgcaaaaactcattaactcagtgcaaaactatgcctggggcagcaaaacggcgttgactgaactttatggtatggaaaatccgtccagccagccgatggccgagctgtggatgggcgcacatccgaaaagcagttcacgagtgcagaatgccgccggagatatcgtttcactgcgtgatgtgattgagagtgataaatcgactctgctcggagaggccgttgccaaacgctttggcgaactgcctttcctgttcaaagtattatgcgcagcacagccactctccattcaggttcatccaaacaaacacaattctgaaatcggttttgccaaagaaaatgccgcaggtatcccgatggatgccgccgagcgtaactataaagatcctaaccacaagccggagctggtttttgcgctgacgcctttccttgcgatgaacgcgtttcgtgaattttccgagattgtctccctactccagccggtcgcaggtgcacatccggcgattgctcactttttacaacagcctgatgccgaacgtttaagcgaactgttcgccagcctgttgaatatgcagggtgaagaaaaatcccgcgcgctggcgattttaaaatcggccctcgatagccagcagggtgaaccgtggcaaacgattcgtttaatttctgaattttacccggaagacagcggtctgttctccccgctattgctgaatgtggtgaaattgaaccctggcgaagcgatgttcctgttcgctgaaacaccgcacgcttacctgcaaggcgtggcgctggaagtgatggcaaactccgataacgtgctgcgtgcgggtctgacgcctaaatacattgatattccggaactggttgccaatgtgaaattcgaagccaaaccggctaaccagttgttgacccagccggtgaaacaaggtgcagaactggacttcccgattccagtggatgattttgccttctcgctgcatgaccttagtgataaagaaaccaccattagccagcagagtgccgccattttgttctgcgtcgaaggcgatgcaacgttgtggaaaggttctcagcagttacagcttaaaccgggtgaatcagcgtttattgccgccaacgaatcaccggtgactgtcaaaggccacggccgtttagcgcgtgtttacaacaagctgtaagagcttactgaaaaaattaacatctcttgctaagctgggagctcgatccgtcgacctgcagatcgttcaaacatttggcaataaagtttcttaagattgaatcctgttgccggtcttgcgatgattatcatataatttctgttgaattacgttaagcatgtaataattaacatgtaatgcatgacgttatttatgagatgggtttttatgattagagtcccgcaattatacatttaatacgcgatagaaaacaaaatatagcgcgcaaactaggataaattatcgcgcgcggtgtcatctatgttactagatccggaccgcctgcaggcccgggggcgcgccctaattagctaacggccaggatcgccgcgtgagcctttagcaactagctagattaattaacgcaatctgttattaagttgtctaagcgtcaatttgtttacaccacaatatatcctgccaccagccagccaacagctccccgaccggcagctcggcacaaaatcaccactcgatacaggcagcccatcagaattaattctcatgtttgacagcttatcatcgactgcacggtgcaccaatgcttctggcgtcaggcagccatcggaagctgtggtatggctgtgcaggtcgtaaatcactgcataattcgtgtcgctcaaggcgcactcccgttctggataatgttttttgcgccgacatcataacggttctggcaaatattctgaaatgagctgttgacaattaatcatccggctcgtataatgtgtggaattgtgagcggataacaatttcacacaggaaacagaccatgagggaagcgttgatcgccgaagtatcgactcaactatcagaggtagttggcgtcatcgagcgccatctcgaaccgacgttgctggccgtacatttgtacggctccgcagtggatggcggcctgaagccacacagtgatattgatttgctggttacggtgaccgtaaggcttgatgaaacaacgcggcgagctttgatcaacgaccttttggaaacttcggcttcccctggagagagcgagattctccgcgctgtagaagtcaccattgttgtgcacgacgacatcattccgtggcgttatccagctaagcgcgaactgcaatttggagaatggcagcgcaatgacattcttgcaggtatcttcgagccagccacgatcgacattgatctggctatcttgctgacaaaagcaagagaacatagcgttgccttggtaggtccagcggcggaggaactctttgatccggttcctgaacaggatctatttgaggcgctaaatgaaaccttaacgctatggaactcgccgcccgactgggctggcgatgagcgaaatgtagtgcttacgttgtcccgcatttggtacagcgcagtaaccggcaaaatcgcgccgaaggatgtcgctgccgactgggcaatggagcgcctgccggcccagtatcagcccgtcatacttgaagctaggcaggcttatcttggacaagaagatcgcttggcctcgcgcgcagatcagttggaagaatttgttcactacgtgaaaggcgagatcaccaaagtagtcggcaaataaagctctagtggatctccgtacccagggatctggctcgcggcggacgcacgacgccggggcgagaccataggcgatctcctaaatcaatagtagctgtaacctcgaagcgtttcacttgtaacaacgattgagaatttttgtcataaaattgaaatacttggttcgcatttttgtcatccgcggtcagccgcaattctgacgaactgcccatttagctggagatgattgtacatccttcacgtgaaaatttctcaagcgctgtgaacaagggttcagattttagattgaaaggtgagccgttgaaacacgttcttcttgtcgatgacgacgtcgctatgcggcatcttattattgaataccttacgatccacgccttcaaagtgaccgcggtagccgacagcacccagttcacaagagtactctcttccgcgacggtcgatgtcgtggttgttgatctagatttaggtcgtgaagatgggctcgagatcgttcgtaatctggcggcaaagtctgatattccaatcataattatcagtggcgaccgccttgaggagacggataaagttgttgcactcgagctaggagcaagtgattttatcgctaagccgttcagtatcagagagtttctagcacgcattcgggttgccttgcgcgtgcgccccaacgttgtccgctccaaagaccgacggtctttttgttttactgactggacacttaatctcaggcaacgtcgcttgatgtccgaagctggcggtgaggtgaaacttacggcaggtgagttcaatcttctcctcgcgtttttagagaaaccccgcgacgttctatcgcgcgagcaacttctcattgccagtcgagtacgcgacgaggaggtttatgacaggagtatagatgttctcattttgaggctgcgccgcaaacttgaggcagatccgtcaagccctcaactgataaaaacagcaagaggtgccggttatttctttgacgcggacgtgcaggtttcgcacggggggacgatggcagcctgagccaattcccagatccccgaggaatcggcgtgagcggtcgcaaaccatccggcccggtacaaatcggcgcggcgctgggtgatgacctggtggagaagttgaaggccgcgcaggccgcccagcggcaacgcatcgaggcagaagcacgccccggtgaatcgtggcaagcggccgctgatcgaatccgcaaagaatcccggcaaccgccggcagccggtgcgccgtcgattaggaagccgcccaagggcgacgagcaaccagattttttcgttccgatgctctatgacgtgggcacccgcgatagtcgcagcatcatggacgtggccgttttccgtctgtcgaagcgtgaccgacgagctggcgaggtgatccgctacgagcttccagacgggcacgtagaggtttccgcagggccggccggcatggccagtgtgtgggattacgacctggtactgatggcggtttcccatctaaccgaatccatgaaccgataccgggaagggaagggagacaagcccggccgcgtgttccgtccacacgttgcggacgtactcaagttctgccggcgagccgatggcggaaagcagaaagacgacctggtagaaacctgcattcggttaaacaccacgcacgttgccatgcagcgtacgaagaaggccaagaacggccgcctggtgacggtatccgagggtgaagccttgattagccgctacaagatcgtaaagagcgaaaccgggcggccggagtacatcgagatcgagctggctgattggatgtaccgcgagatcacagaaggcaagaacccggacgtgctgacggttcaccccgattactttttgatcgatcccggcatcggccgttttctctaccgcctggcacgccgcgccgcaggcaaggcagaagccagatggttgttcaagacgatctacgaacgcagtggcagcgccggagagttcaagaagttctgtttcaccgtgcgcaagctgatcgggtcaaatgacctgccggagtacgatttgaaggaggaggcggggcaggctggcccgatcctagtcatgcgctaccgcaacctgatcgagggcgaagcatccgccggttcctaatgtacggagcagatgctagggcaaattgccctagcaggggaaaaaggtcgaaaaggtctctttcctgtggatagcacgtacattgggaacccaaagccgtacattgggaaccggaacccgtacattgggaacccaaagccgtacattgggaaccggtcacacatgtaagtgactgatataaaagagaaaaaaggcgatttttccgcctaaaactctttaaaacttattaaaactcttaaaacccgcctggcctgtgcataactgtctggccagcgcacagccgaagagctgcaaaaagcgcctacccttcggtcgctgcgctccctacgccccgccgcttcgcgtcggcctatcgcggccgctggccgctcaaaaatggctggcctacggccaggcaatctaccagggcgcggacaagccgcgccgtcgccactcgaccgccggcgctgaggtctgcctcgtgaagaaggtgttgctgactcataccaggcctgaatcgccccatcatccagccagaaagtgagggagccacggttgatgagagctttgttgtaggtggaccagttggtgattttgaacttttgctttgccacggaacggtctgcgttgtcgggaagatgcgtgatctgatccttcaactcagcaaaagttcgatttattcaacaaagccgccgtcccgtcaagtcagcgtaatgctctgccagtgttacaaccaattaaccaattctgattagaaaaactcatcgagcatcaaatgaaactgcaatttattcatatcaggattatcaataccatatttttgaaaaagccgtttctgtaatgaaggagaaaactcaccgaggcagttccataggatggcaagatcctggtatcggtctgcgattccgactcgtccaacatcaatacaacctattaatttcccctcgtcaaaaataaggttatcaagtgagaaatcaccatgagtgacgactgaatccggtgagaatggcaaaagctctgcattaatgaatcggccaacgcgcggggagaggcggtttgcgtattgggcgctcttccgcttcctcgctcactgactcgctgcgctcggtcgttcggctgcggcgagcggtatcagctcactcaaaggcggtaatacggttatccacagaatcaggggataacgcaggaaagaacatgtgagcaaaaggccagcaaaaggccaggaaccgtaaaaaggccgcgttgctggcgtttttccataggctccgcccccctgacgagcatcacaaaaatcgacgctcaagtcagaggtggcgaaacccgacaggactataaagataccaggcgtttccccctggaagctccctcgtgcgctctcctgttccgaccctgccgcttaccggatacctgtccgcctttctcccttcgggaagcgtggcgctttctcatagctcacgctgtaggtatctcagttcggtgtaggtcgttcgctccaagctgggctgtgtgcacgaaccccccgttcagcccgaccgctgcgccttatccggtaactatcgtcttgagtccaacccggtaagacacgacttatcgccactggcagcagccactggtaacaggattagcagagcgaggtatgtaggcggtgctacagagttcttgaagtggtggcctaactacggctacactagaagaacagtatttggtatctgcgctctgctgaagccagttaccttcggaaaaagagttggtagctcttgatccggcaaacaaaccaccgctggtagcggtggtttttttgtttgcaagcagcagattacgcgcagaaaaaaaggatctcaagaagatcctttgatcttttctacggggtctgacgctcagtggaacgaaaactcacgttaagggattttggtcatgagattatcaaaaaggatcttcacctagatccttttgatccggaatta

SEQ ID NO: 109 - DNA, 17504 bp, synthetic construct
  source 1..17504: mol_type = other DNA
attcctgtggttggcatgcacatacaaatggacgaacggataaaccttttcacgcccttttaaatatccgattattctaataaacgctcttttctcttaggtttacccgccaatatatcctgtcaaacactgatagtttaaactggcactagcctaacggtgttgactaactaggccgcttccctaattagctaacccgggggcgcgccgggaccggaattcattatgtggtctaggtaggttctatatataagaaaacttgaaatgttctaaaaaaaaattcaagcccatgcatgattgaagcaaacggtatagcaacggtgttaacctgatctagtgatctcttgcaatccttaacggccacctaccgcaggtagcaaacggcgtccccctcctcgatatctccgcggcgacctctggctttttccgcggaattgcgcggtggggacggattccacgagaccgcgacgcaaccgcctctcgccgctgggccccacaccgctcggtgccgtagcctcacgggactctttctccctcctcccccgttataaattggcttcatcccctccttgcctcatccatccaaatcccagtccccaatcccatcccttcgtaggagaaattcatcgaagctaagcgaatcctcgcgatcctctcaaggtactgcgagttttcgatccccctctcgacccctcgtatgtttgtgtttgtcgtagcgtttgattaggtatgctttccctgtttgtgttcgtcgtagcgtttgattaggtatgctttccctgttcgtgttcatcgtagtgtttgattaggtcgtgtgaggcgatggcctgctcgcgtccttcgatctgtagtcgatttgcgggtcgtggtgtagatctgcgggctgtgatgaagttatttggtgtgatctgctcgcctgattctgcgggttggctcgagtagatatgatggttggaccggttggttcgtttaccgcgctagggttgggctgggatgatgttgcatgcgccgttgcgcgtgatcccgcagcaggacttgcgtttgattgccagatctcgttacgattatgtgatttggtttggactttttagatctgtagcttctgcttatgtgccagatgcgcctactgctcatatgcctgatgataatcataaatggctgtggaactaactagttgattgcggagtcatgtatcagctacaggtgtagggactagctacaggtgtagggacttgcgtctaattgtttggtcctttactcatgttgcaattatgcaatttagtttagattgtttgttccactcatctaggctgtaaaagggacactgcttagattgctgtttaatctttttagtagattatattatattggtaacttattacccctattacatgccatacgtgacttctgctcatgcctgatgataatcatagatcactgtggaattaattagttgattgttgaatcatgtttcatgtacataccacggcacaattgcttagttccttaacaaatgcaaattttactgatccatgtatgatttgcgtggttctctaatgtgaaatactatagctacttgttagtaagaatcaggttcgtatgcttaatgctgtatgtgccttctgctcatgcctgatgataatcatatatcactggaattaattagttgatcgtttaatcatatatcaagtacataccatgccacaatttttagtcacttaacccatgcagattgaactggtccctgcatgttttgctaaattgttctattctgattagaccatatatcatgtatttttttttggtaatggttctcttattttaaatgctatatagttctggtacttgttagaaagatctgcttcatagtttagttgcctatccctcgaattaggatgctgagcagctgatcctatagctttgtttcatgtatcaattcttttgtgttcaacagtcagtttttgttagattcattgtaacttatggtcgcttactcttctggtcctcaatgcttgcagggatcccctaaatagaccatgccgaagaagaagcgcaaggtcgggggcgggggctcaggcgggggcgggagcggcggcgggggctctgggggcggcggcagcggcgggggcggcagcgggggcggcgggtcgatgctgttccaggatttcactcatctgtaccctctctcaaagactgttcggttcgagctcaagcctattgggcggactctggagcacatccacgcgaagaacttcctcagccaggacgaaaccatggccgacatgtaccagaaggtcaaggtcatcctcgacgactaccacagggacttcatcgcggacatgatgggcgaggtgaagctgacgaagctcgccgagttctacgacgtctacctcaagttccgcaagaacccgaaggacgacggcctccagaagcagctcaaggacctgcaggccgtcctgaggaaggagtccgtcaagcccatcggcagcggcggcaagtacaagaccggctacgacaggctgttcggcgccaagctgttcaaggacggcaaggagctcggcgacctggcgaagttcgtgatcgcgcaggagggcgagagctcccccaagctggcccacctggcccacttcgagaagttcagcacgtacttcaccggcttccacgacaacaggaagaacatgtacagcgacgaggacaagcacacggccatcgcctaccgcctcatccacgagaacctgccccgcttcatcgacaacctgcagatcctgacgaccatcaagcagaagcactccgccctgtacgaccagatcatcaacgagctcaccgcgagcggcctcgacgtgtccctcgccagccacctcgacggctaccacaagctcctgacccaggagggcatcaccgcctacaaccgcatcatcggcgaggtgaacggctacaccaacaagcacaaccagatctgccacaagtccgagaggatcgccaagctcaggcccctgcacaagcagatcctcagcgacggcatgggcgtgagcttcctcccgtccaagttcgccgacgactccgagatgtgccaggccgtgaacgagttctacaggcactacaccgacgtgttcgccaaggtgcagtccctgttcgacggcttcgacgaccaccagaaggacggcatctacgtggagcacaagaacctgaacgagctgtccaagcaggccttcggcgactgggccctcctgggccgcgtgctggacggctactacgtggacgtcgtgaacccggagttcaacgagcgcttcgcgaaggcgaagacggacaacgcgaaggccaagctcaccaaggagaaggacaagttcatcaagggcgtccacagcctcgcgtccctggagcaggcgatcgagcaccacaccgcgcgccacgacgacgagtccgtgcaggccggcaagctcggccagtacttcaagcacggcctggccggcgtcgacaacccgatccagaagatccacaacaaccactccaccatcaagggcttcctggagagggagcgcccggcgggcgagcgcgcgctccccaagatcaagtccggcaagaaccccgagatgacgcagctcaggcagctgaaggagctgctcgacaacgcgctcaacgtggcgcacttcgccaagctgctcacgaccaagaccacgctggacaaccaggacggcaacttctacggcgagttcggcgtcctgtacgacgagctggcgaagatcccgaccctgtacaacaaggtccgcgactacctgagccagaagcccttctccaccgagaagtacaagctcaacttcggcaacccgaccctcctgaacggctgggacctcaacaaggagaaggacaacttcggcgtgatcctccagaaggacggctgctactacctcgccctgctggacaaggcgcacaagaaggtcttcgacaacgccccgaacaccggcaagaacgtgtaccagaagatggtgtacaagctgctccccggccccaacaagatgctgccgaaggtgttcttcgcgaagtccaacctcgactactacaaccccagcgccgagctcctggacaagtacgccaagggcacgcacaagaagggcgacaacttcaacctcaaggactgccacgcgctgatcgacttcttcaaggcgggcatcaacaagcaccccgagtggcagcacttcggcttcaagttcagcccgacctccagctacagggacctcagcgacttctaccgcgaggtggagccccagggctaccaggtgaagttcgtcgacatcaacgccgactacatcgacgagctcgtcgagcagggcaagctctacctgttccagatctacaacaaggacttctccccgaaggcccacggcaagccgaacctccacacgctctacttcaaggccctcttcagcgaggacaacctggccgacccgatctacaagctcaacggcgaggcgcagatcttctaccgcaaggccagcctggacatgaacgaaacgaccatccacagggccggcgaggtcctggagaacaagaacccggacaacccgaagaagaggcagttcgtctacgacatcatcaaggacaagaggtacacccaggacaagttcatgctccacgtcccgatcaccatgaacttcggcgtccagggcatgaccatcaaggagttcaacaagaaggtcaaccagagcatccagcagtacgacgaggtgaacgtcatcggcatcgaccgcggcgagaggcacctgctctacctgacggtcatcaactccaagggcgagatcctcgagcagcgcagcctgaacaccatccagcagttcgactaccagaagaagctggacaacagggagaaggagagggtggccgcccgccaggcctggggcgagatcgaaacgatcaaggagctcaagtccggctacctcagccacgtcgtgcaccagatcaaccagctcatgctgaagtacaacgcgatcgtggtcctcgaggacctgaacttcggcttcaagaggggccgcttcaaggtggagaagcagatctaccagaacttcgagaacgccctgatcaagaagctcaaccacctggtcctcaaggacaaggcggacgacgagatcggcagctacaagaacgcgctccagctgaccaacaacttcacggacctcaagtccatcggcaagcagacgggcttcctgttctacgtgccggcgtggaacacctccaagatcgacccggaaaccggcttcgtcgacctgctcaagccgcgctacgagaacatcgcgcagtcccaggcgttcttcggcaagttcgacaagatctgctacaacaccgacaagggctacttcgagttccacatcgactacgcgaagttcaccgacaaggccaagaactccaggcagaagtgggccatctgcagccacggcgacaagcgctacgtgtacgacaagacggcgaaccagaacaagggcgcggccaagggcatcaacgtgaacgacgagctgaagtccctcttcgcgcgctaccacatcaacgacaagcagccgaacctcgtcatggacatctgccagaacaacgacaaggagttccacaagagcctgatgtgcctgctcaagaccctgctccagatgaggaactcgaacgccgcgaccggcgaggactacatcctcagccccgtcgcgaacgacgagggcgtgttcttcaactccgccctcgcggacgacacgcagccgcagaacgccgacgcgaacggcgcctaccacatcgccctcaagggcctgtggctgctcaacgagctcaagaactccgacgacctgaacaaggtgaagctcgccattgacaaccagacgtggctgaatttcgctcagaatagggggggcgggggctcaggcgggggcgggagcggcggcgggggctctgggggcggcggcagcggcgggggcggcagcgggggcggcgggtcgccgaagaagaagcgcaaggtgtccggcggcagctccggcggcagcccgaagaagaagcgcaaagtgtgagggacccgatcgttcaaacatttggcaataaagtttcttaagattgaatcctgttgccggtcttgcgatgattatcatataatttctgttgaattacgttaagcatgtaataattaacatgtaatgcatgacgttatttatgagatgggtttttatgattagagtcccgcaattatacatttaatacgcgatagaaaacaaaatatagcgcgcaaactaggataaattatcgcgcgcggtgtcatctatgttactagatcggtaccgaattcattatgtggtctaggtaggttctatatataagaaaacttgaaatgttctaaaaaaaaattcaagcccatgcatgattgaagcaaacggtatagcaacggtgttaacctgatctagtgatctcttgcaatccttaacggccacctaccgcaggtagcaaacggcgtccccctcctcgatatctccgcggcgacctctggctttttccgcggaattgcgcggtggggacggattccacgagaccgcgacgcaaccgcctctcgccgctgggccccacaccgctcggtgccgtagcctcacgggactctttctccctcctcccccgttataaattggcttcatcccctccttgcctcatccatccaaatcccagtccccaatcccatcccttcgtaggagaaattcatcgaagctaagcgaatcctcgcgatcctctcaaggtactgcgagttttcgatccccctctcgacccctcgtatgtttgtgtttgtcgtagcgtttgattaggtatgctttccctgtttgtgttcgtcgtagcgtttgattaggtatgctttccctgttcgtgttcatcgtagtgtttgattaggtcgtgtgaggcgatggcctgctcgcgtccttcgatctgtagtcgatttgcgggtcgtggtgtagatctgcgggctgtgatgaagttatttggtgtgatctgctcgcctgattctgcgggttggctcgagtagatatgatggttggaccggttggttcgtttaccgcgctagggttgggctgggatgatgttgcatgcgccgttgcgcgtgatcccgcagcaggacttgcgtttgattgccagatctcgttacgattatgtgatttggtttggactttttagatctgtagcttctgcttatgtgccagatgcgcctactgctcatatgcctgatgataatcataaatggctgtggaactaactagttgattgcggagtcatgtatcagctacaggtgtagggactagctacaggtgtagggacttgcgtctaattgtttggtcctttactcatgttgcaattatgcaatttagtttagattgtttgttccactcatctaggctgtaaaagggacactgcttagattgctgtttaatctttttagtagattatattatattggtaacttattacccctattacatgccatacgtgacttctgctcatgcctgatgataatcatagatcactgtggaattaattagttgattgttgaatcatgtttcatgtacataccacggcacaattgcttagttccttaacaaatgcaaattttactgatccatgtatgatttgcgtggttctctaatgtgaaatactatagctacttgttagtaagaatcaggttcgtatgcttaatgctgtatgtgccttctgctcatgcctgatgataatcatatatcactggaattaattagttgatcgtttaatcatatatcaagtacataccatgccacaatttttagtcacttaacccatgcagattgaactggtccctgcatgttttgctaaattgttctattctgattagaccatatatcatgtatttttttttggtaatggttctcttattttaaatgctatatagttctggtacttgttagaaagatctgcttcatagtttagttgcctatccctcgaattaggatgctgagcagctgatcctatagctttgtttcatgtatcaattcttttgtgttcaacagtcagtttttgttagattcattgtaacttatggtcgcttactcttctggtcctcaatgcttgcagaagcttgaaattctgatgagtccgtgaggacgaaacgagtaagctcgtcaatttctactgtttgtagatgggaaagaccgaggagaagatctaatttctactgtttgtagatgcaccaaggaaggggaggagatcaatttctactgtttgtagatgtcacagatcacaaacttcaaatgaatttctactgtttgtagatacgcccagaaagcatacgcagtcggccggcatggtcccagcctcctcgctggcgccggctgggcaacatgcttcggcatggcgaatgggacgatcgttcaaacatttggcaataaagtttcttaagattgaatcctgttgccggtcttgcgatgattatcatataatttctgttgaattacgttaagcatgtaataattaacatgtaatgcatgacgttatttatgagatgggtttttatgattagagtcccgcaattatacatttaatacgcgatagaaaacaaaatatagcgcgcaaactaggataaattatcgcgcgcggtgtcatctatgttactagatccctaggctgcagtgcagcgtgacccggtcgtgcccctctctagagataatgagcattgcatgtctaagttataaaaaattaccacatattttttttgtcacacttgtttgaagtgcagtttatctatctttatacatatatttaaactttactctacgaataatataatctatagtactacaataatatcagtgttttagagaatcatataaatgaacagttagacatggtctaaaggacaattgagtattttgacaacaggactctacagttttatctttttagtgtgcatgtgttctcctttttttttgcaaatagcttcacctatataatacttcatccattttattagtacatccatttagggtttagggttaatggtttttatagactaatttttttagtacatctattttattctattttagcctctaaattaagaaaactaaaactctattttagtttttttatttaataatttagatataaaatagaataaaataaagtgactaaaaattaaacaaataccctttaagaaattaaaaaaactaaggaaacatttttcttgtttcgagtagataatgccagcctgttaaacgccgtcgacgagtctaacggacaccaaccagcgaaccagcagcgtcgcgtcgggccaagcgaagcagacggcacggcatctctgtcgctgcctctggacccctctcgagagttccgctccaccgttggacttgctccgctgtcggcatccagaaattgcgtggcggagcggcagacgtgagccggcacggcaggcggcctcctcctcctctcacggcaccggcagctacgggggattcctttcccaccgctccttcgctttcccttcctcgcccgccgtaataaatagacaccccctccacaccctctttccccaacctcgtgttgttcggagcgcacacacacacaaccagatctcccccaaatccacccgtcggcacctccgcttcaaggtacgccgctcgtcctccccccccccccctctctaccttctctagatcggcgttccggtccatggttagggcccggtagttctacttctgttcatgtttgtgttagatccgtgtttgtgttagatccgtgctgctagcgttcgtacacggatgcgacctgtacgtcagacacgttctgattgctaacttgccagtgtttctctttggggaatcctgggatggctctagccgttccgcagacgggatcgatttcatgattttttttgtttcgttgcatagggtttggtttgcccttttcctttatttcaatatatgccgtgcacttgtttgtcgggtcatcttttcatgcttttttttgtcttggttgtgatgatgtggtctggttgggcggtcgttctagatcggagtagaattctgtttcaaactacctggtggatttattaattttggatctgtatgtgtgtgccatacatattcatagttacgaattgaagatgatggatggaaatatcgatctaggataggtatacatgttgatgcgggttttactgatgcatatacagagatgctttttgttcgcttggttgtgatgatgtggtgtggttgggcggtcgttcattcgttctagatcggagtagaatactgtttcaaactacctggtgtatttattaattttggaactgtatgtgtgtgtcatacatcttcatagttacgagtttaagatggatggaaatatcgatctaggataggtatacatgttgatgtgggttttactgatgcatatacatgatggcatatgcagcatctattcatatgctctaaccttgagtacctatctattataataaacaagtatgttttataattattttgatcttgatatacttggatgatggcatatgcagcagctatatgtggatttttttagccctgccttcatacgctatttatttgcttggtactgtttcttttgtcgatgctcaccctgttgtttggtgttacttctgcagggatcaccgatcatgcaaaaactcattaactcagtgcaaaactatgcctggggcagcaaaacggcgttgactgaactttatggtatggaaaatccgtccagccagccgatggccgagctgtggatgggcgcacatccgaaaagcagttcacgagtgcagaatgccgccggagatatcgtttcactgcgtgatgtgattgagagtgataaatcgactctgctcggagaggccgttgccaaacgctttggcgaactgcctttcctgttcaaagtattatgcgcagcacagccactctccattcaggttcatccaaacaaacacaattctgaaatcggttttgccaaagaaaatgccgcaggtatcccgatggatgccgccgagcgtaactataaagatcctaaccacaagccggagctggtttttgcgctgacgcctttccttgcgatgaacgcgtttcgtgaattttccgagattgtctccctactccagccggtcgcaggtgcacatccggcgattgctcactttttacaacagcctgatgccgaacgtttaagcgaactgttcgccagcctgttgaatatgcagggtgaagaaaaatcccgcgcgctggcgattttaaaatcggccctcgatagccagcagggtgaaccgtggcaaacgattcgtttaatttctgaattttacccggaagacagcggtctgttctccccgctattgctgaatgtggtgaaattgaaccctggcgaagcgatgttcctgttcgctgaaacaccgcacgcttacctgcaaggcgtggcgctggaagtgatggcaaactccgataacgtgctgcgtgcgggtctgacgcctaaatacattgatattccggaactggttgccaatgtgaaattcgaagccaaaccggctaaccagttgttgacccagccggtgaaacaaggtgcagaactggacttcccgattccagtggatgattttgccttctcgctgcatgaccttagtgataaagaaaccaccattagccagcagagtgccgccattttgttctgcgtcgaaggcgatgcaacgttgtggaaaggttctcagcagttacagcttaaaccgggtgaatcagcgtttattgccgccaacgaatcaccggtgactgtcaaaggccacggccgtttagcgcgtgtttacaacaagctgtaagagcttactgaaaaaattaacatctcttgctaagctgggagctcgatccgtcgacctgcagatcgttcaaacatttggcaataaagtttcttaagattgaatcctgttgccggtcttgcgatgattatcatataatttctgttgaattacgttaagcatgtaataattaacatgtaatgcatgacgttatttatgagatgggtttttatgattagagtcccgcaattatacatttaatacgcgatagaaaacaaaatatagcgcgcaaactaggataaattatcgcgcgcggtgtcatctatgttactagatccggaccgcctgcaggcccgggggcgcgccctaattagctaacggccaggatcgccgcgtgagcctttagcaactagctagattaattaacgcaatctgttattaagttgtctaagcgtcaatttgtttacaccacaatatatcctgccaccagccagccaacagctccccgaccggcagctcggcacaaaatcaccactcgatacaggcagcccatcagaattaattctcatgtttgacagcttatcatcgactgcacggtgcaccaatgcttctggcgtcaggcagccatcggaagctgtggtatggctgtgcaggtcgtaaatcactgcataattcgtgtcgctcaaggcgcactcccgttctggataatgttttttgcgccgacatcataacggttctggcaaatattctgaaatgagctgttgacaattaatcatccggctcgtataatgtgtggaattgtgagcggataacaatttcacacaggaaacagaccatgagggaagcgttgatcgccgaagtatcgactcaactatcagaggtagttggcgtcatcgagcgccatctcgaaccgacgttgctggccgtacatttgtacggctccgcagtggatggcggcctgaagccacacagtgatattgatttgctggttacggtgaccgtaaggcttgatgaaacaacgcggcgagctttgatcaacgaccttttggaaacttcggcttcccctggagagagcgagattctccgcgctgtagaagtcaccattgttgtgcacgacgacatcattccgtggcgttatccagctaagcgcgaactgcaatttggagaatggcagcgcaatgacattcttgcaggtatcttcgagccagccacgatcgacattgatctggctatcttgctgacaaaagcaagagaacatagcgttgccttggtaggtccagcggcggaggaactctttgatccggttcctgaacaggatctatttgaggcgctaaatgaaaccttaacgctatggaactcgccgcccgactgggctggcgatgagcgaaatgtagtgcttacgttgtcccgcatttggtacagcgcagtaaccggcaaaatcgcgccgaaggatgtcgctgccgactgggcaatggagcgcctgccggcccagtatcagcccgtcatacttgaagctaggcaggcttatcttggacaagaagatcgcttggcctcgcgcgcagatcagttggaagaatttgttcactacgtgaaaggcgagatcaccaaagtagtcggcaaataaagctctagtggatctccgtacccagggatctggctcgcggcggacgcacgacgccggggcgagaccataggcgatctcctaaatcaatagtagctgtaacctcgaagcgtttcacttgtaacaacgattgagaatttttgtcataaaattgaaatacttggttcgcatttttgtcatccgcggtcagccgcaattctgacgaactgcccatttagctggagatgattgtacatccttcacgtgaaaatttctcaagcgctgtgaacaagggttcagattttagattgaaaggtgagccgttgaaacacgttcttcttgtcgatgacgacgtcgctatgcggcatcttattattgaataccttacgatccacgccttcaaagtgaccgcggtagccgacagcacccagttcacaagagtactctcttccgcgacggtcgatgtcgtggttgttgatctagatttaggtcgtgaagatgggctcgagatcgttcgtaatctggcggcaaagtctgatattccaatcataattatcagtggcgaccgccttgaggagacggataaagttgttgcactcgagctaggagcaagtgattttatcgctaagccgttcagtatcagagagtttctagcacgcattcgggttgccttgcgcgtgcgccccaacgttgtccgctccaaagaccgacggtctttttgttttactgactggacacttaatctcaggcaacgtcgcttgatgtccgaagctggcggtgaggtgaaacttacggcaggtgagttcaatcttctcctcgcgtttttagagaaaccccgcgacgttctatcgcgcgagcaacttctcattgccagtcgagtacgcgacgaggaggtttatgacaggagtatagatgttctcattttgaggctgcgccgcaaacttgaggcagatccgtcaagccctcaactgataaaaacagcaagaggtgccggttatttctttgacgcggacgtgcaggtttcgcacggggggacgatggcagcctgagccaattcccagatccccgaggaatcggcgtgagcggtcgcaaaccatccggcccggtacaaatcggcgcggcgctgggtgatgacctggtggagaagttgaaggccgcgcaggccgcccagcggcaacgcatcgaggcagaagcacgccccggtgaatcgtggcaagcggccgctgatcgaatccgcaaagaatcccggcaaccgccggcagccggtgcgccgtcgattaggaagccgcccaagggcgacgagcaaccagattttttcgttccgatgctctatgacgtgggcacccgcgatagtcgcagcatcatggacgtggccgttttccgtctgtcgaagcgtgaccgacgagctggcgaggtgatccgctacgagcttccagacgggcacgtagaggtttccgcagggccggccggcatggccagtgtgtgggattacgacctggtactgatggcggtttcccatctaaccgaatccatgaaccgataccgggaagggaagggagacaagcccggccgcgtgttccgtccacacgttgcggacgtactcaagttctgccggcgagccgatggcggaaagcagaaagacgacctggtagaaacctgcattcggttaaacaccacgcacgttgccatgcagcgtacgaagaaggccaagaacggccgcctggtgacggtatccgagggtgaagccttgattagccgctacaagatcgtaaagagcgaaaccgggcggccggagtacatcgagatcgagctggctgattggatgtaccgcgagatcacagaaggcaagaacccggacgtgctgacggttcaccccgattactttttgatcgatcccggcatcggccgttttctctaccgcctggcacgccgcgccgcaggcaaggcagaagccagatggttgttcaagacgatctacgaacgcagtggcagcgccggagagttcaagaagttctgtttcaccgtgcgcaagctgatcgggtcaaatgacctgccggagtacgatttgaaggaggaggcggggcaggctggcccgatcctagtcatgcgctaccgcaacctgatcgagggcgaagcatccgccggttcctaatgtacggagcagatgctagggcaaattgccctagcaggggaaaaaggtcgaaaaggtctctttcctgtggatagcacgtacattgggaacccaaagccgtacattgggaaccggaacccgtacattgggaacccaaagccgtacattgggaaccggtcacacatgtaagtgactgatataaaagagaaaaaaggcgatttttccgcctaaaactctttaaaacttattaaaactcttaaaacccgcctggcctgtgcataactgtctggccagcgcacagccgaagagctgcaaaaagcgcctacccttcggtcgctgcgctccctacgccccgccgcttcgcgtcggcctatcgcggccgctggccgctcaaaaatggctggcctacggccaggcaatctaccagggcgcggacaagccgcgccgtcgccactcgaccgccggcgctgaggtctgcctcgtgaagaaggtgttgctgactcataccaggcctgaatcgccccatcatccagccagaaagtgagggagccacggttgatgagagctttgttgtaggtggaccagttggtgattttgaacttttgctttgccacggaacggtctgcgttgtcgggaagatgcgtgatctgatccttcaactcagcaaaagttcgatttattcaacaaagccgccgtcccgtcaagtcagcgtaatgctctgccagtgttacaaccaattaaccaattctgattagaaaaactcatcgagcatcaaatgaaactgcaatttattcatatcaggattatcaataccatatttttgaaaaagccgtttctgtaatgaaggagaaaactcaccgaggcagttccataggatggcaagatcctggtatcggtctgcgattccgactcgtccaacatcaatacaacctattaatttcccctcgtcaaaaataaggttatcaagtgagaaatcaccatgagtgacgactgaatccggtgagaatggcaaaagctctgcattaatgaatcggccaacgcgcggggagaggcggtttgcgtattgggcgctcttccgcttcctcgctcactgactcgctgcgctcggtcgttcggctgcggcgagcggtatcagctcactcaaaggcggtaatacggttatccacagaatcaggggataacgcaggaaagaacatgtgagcaaaaggccagcaaaaggccaggaaccgtaaaaaggccgcgttgctggcgtttttccataggctccgcccccctgacgagcatcacaaaaatcgacgctcaagtcagaggtggcgaaacccgacaggactataaagataccaggcgtttccccctggaagctccctcgtgcgctctcctgttccgaccctgccgcttaccggatacctgtccgcctttctcccttcgggaagcgtggcgctttctcatagctcacgctgtaggtatctcagttcggtgtaggtcgttcgctccaagctgggctgtgtgcacgaaccccccgttcagcccgaccgctgcgccttatccggtaactatcgtcttgagtccaacccggtaagacacgacttatcgccactggcagcagccactggtaacaggattagcagagcgaggtatgtaggcggtgctacagagttcttgaagtggtggcctaactacggctacactagaagaacagtatttggtatctgcgctctgctgaagccagttaccttcggaaaaagagttggtagctcttgatccggcaaacaaaccaccgctggtagcggtggtttttttgtttgcaagcagcagattacgcgcagaaaaaaaggatctcaagaagatcctttgatcttttctacggggtctgacgctcagtggaacgaaaactcacgttaagggattttggtcatgagattatcaaaaaggatcttcacctagatccttttgatccggaatta

SEQ ID NO: 110 - DNA, 17504 bp, synthetic construct
  source 1..17504: mol_type = other DNA
attcctgtggttggcatgcacatacaaatggacgaacggataaaccttttcacgcccttttaaatatccgattattctaataaacgctcttttctcttaggtttacccgccaatatatcctgtcaaacactgatagtttaaactggcactagcctaacggtgttgactaactaggccgcttccctaattagctaacccgggggcgcgccgggaccggaattcattatgtggtctaggtaggttctatatataagaaaacttgaaatgttctaaaaaaaaattcaagcccatgcatgattgaagcaaacggtatagcaacggtgttaacctgatctagtgatctcttgcaatccttaacggccacctaccgcaggtagcaaacggcgtccccctcctcgatatctccgcggcgacctctggctttttccgcggaattgcgcggtggggacggattccacgagaccgcgacgcaaccgcctctcgccgctgggccccacaccgctcggtgccgtagcctcacgggactctttctccctcctcccccgttataaattggcttcatcccctccttgcctcatccatccaaatcccagtccccaatcccatcccttcgtaggagaaattcatcgaagctaagcgaatcctcgcgatcctctcaaggtactgcgagttttcgatccccctctcgacccctcgtatgtttgtgtttgtcgtagcgtttgattaggtatgctttccctgtttgtgttcgtcgtagcgtttgattaggtatgctttccctgttcgtgttcatcgtagtgtttgattaggtcgtgtgaggcgatggcctgctcgcgtccttcgatctgtagtcgatttgcgggtcgtggtgtagatctgcgggctgtgatgaagttatttggtgtgatctgctcgcctgattctgcgggttggctcgagtagatatgatggttggaccggttggttcgtttaccgcgctagggttgggctgggatgatgttgcatgcgccgttgcgcgtgatcccgcagcaggacttgcgtttgattgccagatctcgttacgattatgtgatttggtttggactttttagatctgtagcttctgcttatgtgccagatgcgcctactgctcatatgcctgatgataatcataaatggctgtggaactaactagttgattgcggagtcatgtatcagctacaggtgtagggactagctacaggtgtagggacttgcgtctaattgtttggtcctttactcatgttgcaattatgcaatttagtttagattgtttgttccactcatctaggctgtaaaagggacactgcttagattgctgtttaatctttttagtagattatattatattggtaacttattacccctattacatgccatacgtgacttctgctcatgcctgatgataatcatagatcactgtggaattaattagttgattgttgaatcatgtttcatgtacataccacggcacaattgcttagttccttaacaaatgcaaattttactgatccatgtatgatttgcgtggttctctaatgtgaaatactatagctacttgttagtaagaatcaggttcgtatgcttaatgctgtatgtgccttctgctcatgcctgatgataatcatatatcactggaattaattagttgatcgtttaatcatatatcaagtacataccatgccacaatttttagtcacttaacccatgcagattgaactggtccctgcatgttttgctaaattgttctattctgattagaccatatatcatgtatttttttttggtaatggttctcttattttaaatgctatatagttctggtacttgttagaaagatctgcttcatagtttagttgcctatccctcgaattaggatgctgagcagctgatcctatagctttgtttcatgtatcaattcttttgtgttcaacagtcagtttttgttagattcattgtaacttatggtcgcttactcttctggtcctcaatgcttgcagggatcccctaaatagaccatgccgaagaagaagcgcaaggtcgggggcgggggctcaggcgggggcgggagcggcggcgggggctctgggggcggcggcagcggcgggggcggcagcgggggcggcgggtcgatgctgttccaggatttcactcatctgtaccctctctcaaagactgttcggttcgagctcaagcctattgggcggactctggagcacatccacgcgaagaacttcctcagccaggacgaaaccatggccgacatgtaccagaaggtcaaggtcatcctcgacgactaccacagggacttcatcgcggacatgatgggcgaggtgaagctgacgaagctcgccgagttctacgacgtctacctcaagttccgcaagaacccgaaggacgacggcctccagaagcagctcaaggacctgcaggccgtcctgaggaaggagtccgtcaagcccatcggcagcggcggcaagtacaagaccggctacgacaggctgttcggcgccaagctgttcaaggacggcaaggagctcggcgacctggcgaagttcgtgatcgcgcaggagggcgagagctcccccaagctggcccacctggcccacttcgagaagttcagcacgtacttcaccggcttccacaggaacaggaagaacatgtacagcgacgaggacaagcacacggccatcgcctaccgcctcatccacgagaacctgccccgcttcatcgacaacctgcagatcctgacgaccatcaagcagaagcactccgccctgtacgaccagatcatcaacgagctcaccgcgagcggcctcgacgtgtccctcgccagccacctcgacggctaccacaagctcctgacccaggagggcatcaccgcctacaaccgcatcatcggcgaggtgaacggctacaccaacaagcacaaccagatctgccacaagtccgagaggatcgccaagctcaggcccctgcacaagcagatcctcagcgacggcatgggcgtgagcttcctcccgtccaagttcgccgacgactccgagatgtgccaggccgtgaacgagttctacaggcactacaccgacgtgttcgccaaggtgcagtccctgttcgacggcttcgacgaccaccagaaggacggcatctacgtggagcacaagaacctgaacgagctgtccaagcaggccttcggcgactgggccctcctgggccgcgtgctggacggctactacgtggacgtcgtgaacccggagttcaacgagcgcttcgcgaaggcgaagacggacaacgcgaaggccaagctcaccaaggagaaggacaagttcatcaagggcgtccacagcctcgcgtccctggagcaggcgatcgagcaccacaccgcgcgccacgacgacgagtccgtgcaggccggcaagctcggccagtacttcaagcacggcctggccggcgtcgacaacccgatccagaagatccacaacaaccactccaccatcaagggcttcctggagagggagcgcccggcgggcgagcgcgcgctccccaagatcaagtccggcaagaaccccgagatgacgcagctcaggcagctgaaggagctgctcgacaacgcgctcaacgtggcgcacttcgccaagctgctcacgaccaagaccacgctggacaaccaggacggcaacttctacggcgagttcggcgtcctgtacgacgagctggcgaagatcccgaccctgtacaacaaggtccgcgactacctgagccagaagcccttctccaccgagaagtacaagctcaacttcggcaacccgaccctcctgaacggctgggacctcaacaaggagaaggacaacttcggcgtgatcctccagaaggacggctgctactacctcgccctgctggacaaggcgcacaagaaggtcttcgacaacgccccgaacaccggcaagaacgtgtaccagaagatggtgtacaagctgctccccggccccaacaagatgctgccgaaggtgttcttcgcgaagtccaacctcgactactacaaccccagcgccgagctcctggacaagtacgccaagggcacgcacaagaagggcgacaacttcaacctcaaggactgccacgcgctgatcgacttcttcaaggcgggcatcaacaagcaccccgagtggcagcacttcggcttcaagttcagcccgacctccagctacagggacctcagcgacttctaccgcgaggtggagccccagggctaccaggtgaagttcgtcgacatcaacgccgactacatcgacgagctcgtcgagcagggcaagctctacctgttccagatctacaacaaggacttctccccgaaggcccacggcaagccgaacctccacacgctctacttcaaggccctcttcagcgaggacaacctggccgacccgatctacaagctcaacggcgaggcgcagatcttctaccgcaaggccagcctggacatgaacgaaacgaccatccacagggccggcgaggtcctggagaacaagaacccggacaacccgaagaagaggcagttcgtctacgacatcatcaaggacaagaggtacacccaggacaagttcatgctccacgtcccgatcaccatgaacttcggcgtccagggcatgaccatcaaggagttcaacaagaaggtcaaccagagcatccagcagtacgacgaggtgaacgtcatcggcatcgaccgcggcgagaggcacctgctctacctgacggtcatcaactccaagggcgagatcctcgagcagcgcagcctgaacaccatccagcagttcgactaccagaagaagctggacaacagggagaaggagagggtggccgcccgccaggcctggggcgagatcgaaacgatcaaggagctcaagtccggctacctcagccacgtcgtgcaccagatcaaccagctcatgctgaagtacaacgcgatcgtggtcctcgaggacctgaacttcggcttcaagaggggccgcttcaaggtggagaagcagatctaccagaacttcgagaacgccctgatcaagaagctcaaccacctggtcctcaaggacaaggcggacgacgagatcggcagctacaagaacgcgctccagctgaccaacaacttcacggacctcaagtccatcggcaagcagacgggcttcctgttctacgtgccggcgtggaacacctccaagatcgacccggaaaccggcttcgtcgacctgctcaagccgcgctacgagaacatcgcgcagtcccaggcgttcttcggcaagttcgacaagatctgctacaacaccgacaagggctacttcgagttccacatcgactacgcgaagttcaccgacaaggccaagaactccaggcagaagtgggccatctgcagccacggcgacaagcgctacgtgtacgacaagacggcgaaccagaacaagggcgcggccaagggcatcaacgtgaacgacgagctgaagtccctcttcgcgcgctaccacatcaacgacaagcagccgaacctcgtcatggacatctgccagaacaacgacaaggagttccacaagagcctgatgtgcctgctcaagaccctgctccagatgaggaactcgaacgccgcgaccggcgaggactacatcctcagccccgtcgcgaacgacgagggcgtgttcttcaactccgccctcgcggacgacacgcagccgcagaacgccgacgcgaacggcgcctaccacatcgccctcaagggcctgtggctgctcaacgagctcaagaactccgacgacctgaacaaggtgaagctcgccattgacaaccagacgtggctgaatttcgctcagaatagggggggcgggggctcaggcgggggcgggagcggcggcgggggctctgggggcggcggcagcggcgggggcggcagcgggggcggcgggtcgccgaagaagaagcgcaaggtgtccggcggcagctccggcggcagcccgaagaagaagcgcaaagtgtgagggacccgatcgttcaaacatttggcaataaagtttcttaagattgaatcctgttgccggtcttgcgatgattatcatataatttctgttgaattacgttaagcatgtaataattaacatgtaatgcatgacgttatttatgagatgggtttttatgattagagtcccgcaattatacatttaatacgcgatagaaaacaaaatatagcgcgcaaactaggataaattatcgcgcgcggtgtcatctatgttactagatcggtaccgaattcattatgtggtctaggtaggttctatatataagaaaacttgaaatgttctaaaaaaaaattcaagcccatgcatgattgaagcaaacggtatagcaacggtgttaacctgatctagtgatctcttgcaatccttaacggccacctaccgcaggtagcaaacggcgtccccctcctcgatatctccgcggcgacctctggctttttccgcggaattgcgcggtggggacggattccacgagaccgcgacgcaaccgcctctcgccgctgggccccacaccgctcggtgccgtagcctcacgggactctttctccctcctcccccgttataaattggcttcatcccctccttgcctcatccatccaaatcccagtccccaatcccatcccttcgtaggagaaattcatcgaagctaagcgaatcctcgcgatcctctcaaggtactgcgagttttcgatccccctctcgacccctcgtatgtttgtgtttgtcgtagcgtttgattaggtatgctttccctgtttgtgttcgtcgtagcgtttgattaggtatgctttccctgttcgtgttcatcgtagtgtttgattaggtcgtgtgaggcgatggcctgctcgcgtccttcgatctgtagtcgatttgcgggtcgtggtgtagatctgcgggctgtgatgaagttatttggtgtgatctgctcgcctgattctgcgggttggctcgagtagatatgatggttggaccggttggttcgtttaccgcgctagggttgggctgggatgatgttgcatgcgccgttgcgcgtgatcccgcagcaggacttgcgtttgattgccagatctcgttacgattatgtgatttggtttggactttttagatctgtagcttctgcttatgtgccagatgcgcctactgctcatatgcctgatgataatcataaatggctgtggaactaactagttgattgcggagtcatgtatcagctacaggtgtagggactagctacaggtgtagggacttgcgtctaattgtttggtcctttactcatgttgcaattatgcaatttagtttagattgtttgttccactcatctaggctgtaaaagggacactgcttagattgctgtttaatctttttagtagattatattatattggtaacttattacccctattacatgccatacgtgacttctgctcatgcctgatgataatcatagatcactgtggaattaattagttgattgttgaatcatgtttcatgtacataccacggcacaattgcttagttccttaacaaatgcaaattttactgatccatgtatgatttgcgtggttctctaatgtgaaatactatagctacttgttagtaagaatcaggttcgtatgcttaatgctgtatgtgccttctgctcatgcctgatgataatcatatatcactggaattaattagttgatcgtttaatcatatatcaagtacataccatgccacaatttttagtcacttaacccatgcagattgaactggtccctgcatgttttgctaaattgttctattctgattagaccatatatcatgtatttttttttggtaatggttctcttattttaaatgctatatagttctggtacttgttagaaagatctgcttcatagtttagttgcctatccctcgaattaggatgctgagcagctgatcctatagctttgtttcatgtatcaattcttttgtgttcaacagtcagtttttgttagattcattgtaacttatggtcgcttactcttctggtcctcaatgcttgcagaagcttgaaattctgatgagtccgtgaggacgaaacgagtaagctcgtcaatttctactgtttgtagatgggaaagaccgaggagaagatctaatttctactgtttgtagatgcaccaaggaaggggaggagatcaatttctactgtttgtagatgtcacagatcacaaacttcaaatgaatttctactgtttgtagatacgcccagaaagcatacgcagtcggccggcatggtcccagcctcctcgctggcgccggctgggcaacatgcttcggcatggcgaatgggacgatcgttcaaacatttggcaataaagtttcttaagattgaatcctgttgccggtcttgcgatgattatcatataatttctgttgaattacgttaagcatgtaataattaacatgtaatgcatgacgttatttatgagatgggtttttatgattagagtcccgcaattatacatttaatacgcgatagaaaacaaaatatagcgcgcaaactaggataaattatcgcgcgcggtgtcatctatgttactagatccctaggctgcagtgcagcgtgacccggtcgtgcccctctctagagataatgagcattgcatgtctaagttataaaaaattaccacatattttttttgtcacacttgtttgaagtgcagtttatctatctttatacatatatttaaactttactctacgaataatataatctatagtactacaataatatcagtgttttagagaatcatataaatgaacagttagacatggtctaaaggacaattgagtattttgacaacaggactctacagttttatctttttagtgtgcatgtgttctcctttttttttgcaaatagcttcacctatataatacttcatccattttattagtacatccatttagggtttagggttaatggtttttatagactaatttttttagtacatctattttattctattttagcctctaaattaagaaaactaaaactctattttagtttttttatttaataatttagatataaaatagaataaaataaagtgactaaaaattaaacaaataccctttaagaaattaaaaaaactaaggaaacatttttcttgtttcgagtagataatgccagcctgttaaacgccgtcgacgagtctaacggacaccaaccagcgaaccagcagcgtcgcgtcgggccaagcgaagcagacggcacggcatctctgtcgctgcctctggacccctctcgagagttccgctccaccgttggacttgctccgctgtcggcatccagaaattgcgtggcggagcggcagacgtgagccggcacggcaggcggcctcctcctcctctcacggcaccggcagctacgggggattcctttcccaccgctccttcgctttcccttcctcgcccgccgtaataaatagacaccccctccacaccctctttccccaacctcgtgttgttcggagcgcacacacacacaaccagatctcccccaaatccacccgtcggcacctccgcttcaaggtacgccgctcgtcctccccccccccccctctctaccttctctagatcggcgttccggtccatggttagggcccggtagttctacttctgttcatgtttgtgttagatccgtgtttgtgttagatccgtgctgctagcgttcgtacacggatgcgacctgtacgtcagacacgttctgattgctaacttgccagtgtttctctttggggaatcctgggatggctctagccgttccgcagacgggatcgatttcatgattttttttgtttcgttgcatagggtttggtttgcccttttcctttatttcaatatatgccgtgcacttgtttgtcgggtcatcttttcatgcttttttttgtcttggttgtgatgatgtggtctggttgggcggtcgttctagatcggagtagaattctgtttcaaactacctggtggatttattaattttggatctgtatgtgtgtgccatacatattcatagttacgaattgaagatgatggatggaaatatcgatctaggataggtatacatgttgatgcgggttttactgatgcatatacagagatgctttttgttcgcttggttgtgatgatgtggtgtggttgggcggtcgttcattcgttctagatcggagtagaatactgtttcaaactacctggtgtatttattaattttggaactgtatgtgtgtgtcatacatcttcatagttacgagtttaagatggatggaaatatcgatctaggataggtatacatgttgatgtgggttttactgatgcatatacatgatggcatatgcagcatctattcatatgctctaaccttgagtacctatctattataataaacaagtatgttttataattattttgatcttgatatacttggatgatggcatatgcagcagctatatgtggatttttttagccctgccttcatacgctatttatttgcttggtactgtttcttttgtcgatgctcaccctgttgtttggtgttacttctgcagggatcaccgatcatgcaaaaactcattaactcagtgcaaaactatgcctggggcagcaaaacggcgttgactgaactttatggtatggaaaatccgtccagccagccgatggccgagctgtggatgggcgcacatccgaaaagcagttcacgagtgcagaatgccgccggagatatcgtttcactgcgtgatgtgattgagagtgataaatcgactctgctcggagaggccgttgccaaacgctttggcgaactgcctttcctgttcaaagtattatgcgcagcacagccactctccattcaggttcatccaaacaaacacaattctgaaatcggttttgccaaagaaaatgccgcaggtatcccgatggatgccgccgagcgtaactataaagatcctaaccacaagccggagctggtttttgcgctgacgcctttccttgcgatgaacgcgtttcgtgaattttccgagattgtctccctactccagccggtcgcaggtgcacatccggcgattgctcactttttacaacagcctgatgccgaacgtttaagcgaactgttcgccagcctgttgaatatgcagggtgaagaaaaatcccgcgcgctggcgattttaaaatcggccctcgatagccagcagggtgaaccgtggcaaacgattcgtttaatttctgaattttacccggaagacagcggtctgttctccccgctattgctgaatgtggtgaaattgaaccctggcgaagcgatgttcctgttcgctgaaacaccgcacgcttacctgcaaggcgtggcgctggaagtgatggcaaactccgataacgtgctgcgtgcgggtctgacgcctaaatacattgatattccggaactggttgccaatgtgaaattcgaagccaaaccggctaaccagttgttgacccagccggtgaaacaaggtgcagaactggacttcccgattccagtggatgattttgccttctcgctgcatgaccttagtgataaagaaaccaccattagccagcagagtgccgccattttgttctgcgtcgaaggcgatgcaacgttgtggaaaggttctcagcagttacagcttaaaccgggtgaatcagcgtttattgccgccaacgaatcaccggtgactgtcaaaggccacggccgtttagcgcgtgtttacaacaagctgtaagagcttactgaaaaaattaacatctcttgctaagctgggagctcgatccgtcgacctgcagatcgttcaaacatttggcaataaagtttcttaagattgaatcctgttgccggtcttgcgatgattatcatataatttctgttgaattacgttaagcatgtaataattaacatgtaatgcatgacgttatttatgagatgggtttttatgattagagtcccgcaattatacatttaatacgcgatagaaaacaaaatatagcgcgcaaactaggataaattatcgcgcgcggtgtcatctatgttactagatccggaccgcctgcaggcccgggggcgcgccctaattagctaacggccaggatcgccgcgtgagcctttagcaactagctagattaattaacgcaatctgttattaagttgtctaagcgtcaatttgtttacaccacaatatatcctgccaccagccagccaacagctccccgaccggcagctcggcacaaaatcaccactcgatacaggcagcccatcagaattaattctcatgtttgacagcttatcatcgactgcacggtgcaccaatgcttctggcgtcaggcagccatcggaagctgtggtatggctgtgcaggtcgtaaatcactgcataattcgtgtcgctcaaggcgcactcccgttctggataatgttttttgcgccgacatcataacggttctggcaaatattctgaaatgagctgttgacaattaatcatccggctcgtataatgtgtggaattgtgagcggataacaatttcacacaggaaacagaccatgagggaagcgttgatcgccgaagtatcgactcaactatcagaggtagttggcgtcatcgagcgccatctcgaaccgacgttgctggccgtacatttgtacggctccgcagtggatggcggcctgaagccacacagtgatattgatttgctggttacggtgaccgtaaggcttgatgaaacaacgcggcgagctttgatcaacgaccttttggaaacttcggcttcccctggagagagcgagattctccgcgctgtagaagtcaccattgttgtgcacgacgacatcattccgtggcgttatccagctaagcgcgaactgcaatttggagaatggcagcgcaatgacattcttgcaggtatcttcgagccagccacgatcgacattgatctggctatcttgctgacaaaagcaagagaacatagcgttgccttggtaggtccagcggcggaggaactctttgatccggttcctgaacaggatctatttgaggcgctaaatgaaaccttaacgctatggaactcgccgcccgactgggctggcgatgagcgaaatgtagtgcttacgttgtcccgcatttggtacagcgcagtaaccggcaaaatcgcgccgaaggatgtcgctgccgactgggcaatggagcgcctgccggcccagtatcagcccgtcatacttgaagctaggcaggcttatcttggacaagaagatcgcttggcctcgcgcgcagatcagttggaagaatttgttcactacgtgaaaggcgagatcaccaaagtagtcggcaaataaagctctagtggatctccgtacccagggatctggctcgcggcggacgcacgacgccggggcgagaccataggcgatctcctaaatcaatagtagctgtaacctcgaagcgtttcacttgtaacaacgattgagaatttttgtcataaaattgaaatacttggttcgcatttttgtcatccgcggtcagccgcaattctgacgaactgcccatttagctggagatgattgtacatccttcacgtgaaaatttctcaagcgctgtgaacaagggttcagattttagattgaaaggtgagccgttgaaacacgttcttcttgtcgatgacgacgtcgctatgcggcatcttattattgaataccttacgatccacgccttcaaagtgaccgcggtagccgacagcacccagttcacaagagtactctcttccgcgacggtcgatgtcgtggttgttgatctagatttaggtcgtgaagatgggctcgagatcgttcgtaatctggcggcaaagtctgatattccaatcataattatcagtggcgaccgccttgaggagacggataaagttgttgcactcgagctaggagcaagtgattttatcgctaagccgttcagtatcagagagtttctagcacgcattcgggttgccttgcgcgtgcgccccaacgttgtccgctccaaagaccgacggtctttttgttttactgactggacacttaatctcaggcaacgtcgcttgatgtccgaagctggcggtgaggtgaaacttacggcaggtgagttcaatcttctcctcgcgtttttagagaaaccccgcgacgttctatcgcgcgagcaacttctcattgccagtcgagtacgcgacgaggaggtttatgacaggagtatagatgttctcattttgaggctgcgccgcaaacttgaggcagatccgtcaagccctcaactgataaaaacagcaagaggtgccggttatttctttgacgcggacgtgcaggtttcgcacggggggacgatggcagcctgagccaattcccagatccccgaggaatcggcgtgagcggtcgcaaaccatccggcccggtacaaatcggcgcggcgctgggtgatgacctggtggagaagttgaaggccgcgcaggccgcccagcggcaacgcatcgaggcagaagcacgccccggtgaatcgtggcaagcggccgctgatcgaatccgcaaagaatcccggcaaccgccggcagccggtgcgccgtcgattaggaagccgcccaagggcgacgagcaaccagattttttcgttccgatgctctatgacgtgggcacccgcgatagtcgcagcatcatggacgtggccgttttccgtctgtcgaagcgtgaccgacgagctggcgaggtgatccgctacgagcttccagacgggcacgtagaggtttccgcagggccggccggcatggccagtgtgtgggattacgacctggtactgatggcggtttcccatctaaccgaatccatgaaccgataccgggaagggaagggagacaagcccggccgcgtgttccgtccacacgttgcggacgtactcaagttctgccggcgagccgatggcggaaagcagaaagacgacctggtagaaacctgcattcggttaaacaccacgcacgttgccatgcagcgtacgaagaaggccaagaacggccgcctggtgacggtatccgagggtgaagccttgattagccgctacaagatcgtaaagagcgaaaccgggcggccggagtacatcgagatcgagctggctgattggatgtaccgcgagatcacagaaggcaagaacccggacgtgctgacggttcaccccgattactttttgatcgatcccggcatcggccgttttctctaccgcctggcacgccgcgccgcaggcaaggcagaagccagatggttgttcaagacgatctacgaacgcagtggcagcgccggagagttcaagaagttctgtttcaccgtgcgcaagctgatcgggtcaaatgacctgccggagtacgatttgaaggaggaggcggggcaggctggcccgatcctagtcatgcgctaccgcaacctgatcgagggcgaagcatccgccggttcctaatgtacggagcagatgctagggcaaattgccctagcaggggaaaaaggtcgaaaaggtctctttcctgtggatagcacgtacattgggaacccaaagccgtacattgggaaccggaacccgtacattgggaacccaaagccgtacattgggaaccggtcacacatgtaagtgactgatataaaagagaaaaaaggcgatttttccgcctaaaactctttaaaacttattaaaactcttaaaacccgcctggcctgtgcataactgtctggccagcgcacagccgaagagctgcaaaaagcgcctacccttcggtcgctgcgctccctacgccccgccgcttcgcgtcggcctatcgcggccgctggccgctcaaaaatggctggcctacggccaggcaatctaccagggcgcggacaagccgcgccgtcgccactcgaccgccggcgctgaggtctgcctcgtgaagaaggtgttgctgactcataccaggcctgaatcgccccatcatccagccagaaagtgagggagccacggttgatgagagctttgttgtaggtggaccagttggtgattttgaacttttgctttgccacggaacggtctgcgttgtcgggaagatgcgtgatctgatccttcaactcagcaaaagttcgatttattcaacaaagccgccgtcccgtcaagtcagcgtaatgctctgccagtgttacaaccaattaaccaattctgattagaaaaactcatcgagcatcaaatgaaactgcaatttattcatatcaggattatcaataccatatttttgaaaaagccgtttctgtaatgaaggagaaaactcaccgaggcagttccataggatggcaagatcctggtatcggtctgcgattccgactcgtccaacatcaatacaacctattaatttcccctcgtcaaaaataaggttatcaagtgagaaatcaccatgagtgacgactgaatccggtgagaatggcaaaagctctgcattaatgaatcggccaacgcgcggggagaggcggtttgcgtattgggcgctcttccgcttcctcgctcactgactcgctgcgctcggtcgttcggctgcggcgagcggtatcagctcactcaaaggcggtaatacggttatccacagaatcaggggataacgcaggaaagaacatgtgagcaaaaggccagcaaaaggccaggaaccgtaaaaaggccgcgttgctggcgtttttccataggctccgcccccctgacgagcatcacaaaaatcgacgctcaagtcagaggtggcgaaacccgacaggactataaagataccaggcgtttccccctggaagctccctcgtgcgctctcctgttccgaccctgccgcttaccggatacctgtccgcctttctcccttcgggaagcgtggcgctttctcatagctcacgctgtaggtatctcagttcggtgtaggtcgttcgctccaagctgggctgtgtgcacgaaccccccgttcagcccgaccgctgcgccttatccggtaactatcgtcttgagtccaacccggtaagacacgacttatcgccactggcagcagccactggtaacaggattagcagagcgaggtatgtaggcggtgctacagagttcttgaagtggtggcctaactacggctacactagaagaacagtatttggtatctgcgctctgctgaagccagttaccttcggaaaaagagttggtagctcttgatccggcaaacaaaccaccgctggtagcggtggtttttttgtttgcaagcagcagattacgcgcagaaaaaaaggatctcaagaagatcctttgatcttttctacggggtctgacgctcagtggaacgaaaactcacgttaagggattttggtcatgagattatcaaaaaggatcttcacctagatccttttgatccggaatta

SEQ ID NO: 111 - DNA, 17504 bp, synthetic construct
  source 1..17504: mol_type = other DNA
attcctgtggttggcatgcacatacaaatggacgaacggataaaccttttcacgcccttttaaatatccgattattctaataaacgctcttttctcttaggtttacccgccaatatatcctgtcaaacactgatagtttaaactggcactagcctaacggtgttgactaactaggccgcttccctaattagctaacccgggggcgcgccgggaccggaattcattatgtggtctaggtaggttctatatataagaaaacttgaaatgttctaaaaaaaaattcaagcccatgcatgattgaagcaaacggtatagcaacggtgttaacctgatctagtgatctcttgcaatccttaacggccacctaccgcaggtagcaaacggcgtccccctcctcgatatctccgcggcgacctctggctttttccgcggaattgcgcggtggggacggattccacgagaccgcgacgcaaccgcctctcgccgctgggccccacaccgctcggtgccgtagcctcacgggactctttctccctcctcccccgttataaattggcttcatcccctccttgcctcatccatccaaatcccagtccccaatcccatcccttcgtaggagaaattcatcgaagctaagcgaatcctcgcgatcctctcaaggtactgcgagttttcgatccccctctcgacccctcgtatgtttgtgtttgtcgtagcgtttgattaggtatgctttccctgtttgtgttcgtcgtagcgtttgattaggtatgctttccctgttcgtgttcatcgtagtgtttgattaggtcgtgtgaggcgatggcctgctcgcgtccttcgatctgtagtcgatttgcgggtcgtggtgtagatctgcgggctgtgatgaagttatttggtgtgatctgctcgcctgattctgcgggttggctcgagtagatatgatggttggaccggttggttcgtttaccgcgctagggttgggctgggatgatgttgcatgcgccgttgcgcgtgatcccgcagcaggacttgcgtttgattgccagatctcgttacgattatgtgatttggtttggactttttagatctgtagcttctgcttatgtgccagatgcgcctactgctcatatgcctgatgataatcataaatggctgtggaactaactagttgattgcggagtcatgtatcagctacaggtgtagggactagctacaggtgtagggacttgcgtctaattgtttggtcctttactcatgttgcaattatgcaatttagtttagattgtttgttccactcatctaggctgtaaaagggacactgcttagattgctgtttaatctttttagtagattatattatattggtaacttattacccctattacatgccatacgtgacttctgctcatgcctgatgataatcatagatcactgtggaattaattagttgattgttgaatcatgtttcatgtacataccacggcacaattgcttagttccttaacaaatgcaaattttactgatccatgtatgatttgcgtggttctctaatgtgaaatactatagctacttgttagtaagaatcaggttcgtatgcttaatgctgtatgtgccttctgctcatgcctgatgataatcatatatcactggaattaattagttgatcgtttaatcatatatcaagtacataccatgccacaatttttagtcacttaacccatgcagattgaactggtccctgcatgttttgctaaattgttctattctgattagaccatatatcatgtatttttttttggtaatggttctcttattttaaatgctatatagttctggtacttgttagaaagatctgcttcatagtttagttgcctatccctcgaattaggatgctgagcagctgatcctatagctttgtttcatgtatcaattcttttgtgttcaacagtcagtttttgttagattcattgtaacttatggtcgcttactcttctggtcctcaatgcttgcagggatcccctaaatagaccatgccgaagaagaagcgcaaggtcgggggcgggggctcaggcgggggcgggagcggcggcgggggctctgggggcggcggcagcggcgggggcggcagcgggggcggcgggtcgatgctgttccaggatttcactcatctgtaccctctctcaaagactgttcggttcgagctcaagcctattgggcggactctggagcacatccacgcgaagaacttcctcagccaggacgaaaccatggccgacatgtaccagaaggtcaaggtcatcctcgacgactaccacagggacttcatcgcggacatgatgggcgaggtgaagctgacgaagctcgccgagttctacgacgtctacctcaagttccgcaagaacccgaaggacgacggcctccagaagcagctcaaggacctgcaggccgtcctgaggaaggagtccgtcaagcccatcggcagcggcggcaagtacaagaccggctacgacaggctgttcggcgccaagctgttcaaggacggcaaggagctcggcgacctggcgaagttcgtgatcgcgcaggagggcgagagctcccccaagctggcccacctggcccacttcgagaagttcagcacgtacttcaccggcttccacgacaacaggaagaacatgtacagcgacgaggacaagcacacggccatcgcctaccgcctcatccacgagaacctgccccgcttcatcgacaacctgcagatcctgacgaccatcaagcagaagcactccgccctgtacgaccagatcatcaacgagctcaccgcgagcggcctcgacgtgtccctcgccagccacctcgacggctaccacaagctcctgacccaggagggcatcaccgcctacaaccgcatcatcggcgaggtgaacggctacaccaacaagcacaaccagatctgccacaagtccgagaggatcgccaagctcaggcccctgcacaagcagatcctcagcgacggcatgggcgtgagcttcctcccgtccaagttcgccgacgactccgagatgtgccaggccgtgaacgagttctacaggcactacaccgacgtgttcgccaaggtgcagtccctgttcgacggcttcgacgaccaccagaaggacggcatctacgtggagcacaagaacctgaacgagctgtccaagcaggccttcggcgactgggccctcctgggccgcgtgctggacggctactacgtggacgtcgtgaacccggagttcaacgagcgcttcgcgaaggcgaagacggacaacgcgaaggccaagctcaccaaggagaaggacaagttcatcaagggcgtccacagcctcgcgtccctggagcaggcgatcgagcaccacaccgcgcgccacgacgacgagtccgtgcaggccggcaagctcggccagtacttcaagcacggcctggccggcgtcgacaacccgatccagaagatccacaacaaccactccaccatcaagggcttcctggagagggagcgcccggcgggcgagcgcgcgctccccaagatcaagtccggcaagaaccccgagatgacgcagctcaggcagctgaaggagctgctcgacaacgcgctcaacgtggcgcacttcgccaagctgctcacgaccaagaccacgctggacaaccaggacggcaacttctacggcgagttcggcgtcctgtacgacgagctggcgaagatcccgaccctgtacaacaaggtccgcgactacctgagccagaagcccttctccaccgagaagtacaagctcaacttcggcaacccgaccctcctgaacggctgggacctcaacaaggagaaggacaacttcggcgtgatcctccagaaggacggctgctactacctcgccctgctggacaaggcgcacaagaaggtcttcgacaacgccccgaacaccggcaagaacgtgtaccagaagatggtgtacaagctgctccccggccccaacaagatgctgccgaaggtgttcttcgcgaagtccaacctcgactactacaaccccagcgccgagctcctggacaagtacgccaagggcacgcacaagaagggcgacaacttcaacctcaaggactgccacgcgctgatcgacttcttcaaggcgggcatcaacaagcaccccgagtggcagcacttcggcttcaagttcagcccgacctccagctacagggacctcagcgacttctaccgcgaggtggagccccagggctaccaggtgaagttcgtcgacatcaacgccgactacatcgacgagctcgtcgagcagggcaagctctacctgttccagatctacaacaaggacttctccccgaaggcccacggcaagccgaacctccacacgctctacttcaaggccctcttcagcgaggacaacctggccgacccgatctacaagctcaacggcgaggcgcagatcttctaccgcaaggccagcctggacatgaacgaaacgaccatccacagggccggcgaggtcctggagaacaagaacccggacaacccgaagaagaggcagttcgtctacgacatcatcaaggacaagaggtacacccaggacaagttcatgctccacgtcccgatcaccatgaacttcggcgtccagggcatgaccatcaaggagttcaacaagaaggtcaaccagagcatccagcagtacgacgaggtgaacgtcatcggcatcgaccgcggcgagaggcacctgctctacctgacggtcatcaactccaagggcgagatcctcgagcagcgcagcctgaacaccatccagcagttcgactaccagaagaagctggacaacagggagaaggagagggtggccgcccgcaaggcctggggcgagatcgaaacgatcaaggagctcaagtccggctacctcagccacgtcgtgcaccagatcaaccagctcatgctgaagtacaacgcgatcgtggtcctcgaggacctgaacttcggcttcaagaggggccgcttcaaggtggagaagcagatctaccagaacttcgagaacgccctgatcaagaagctcaaccacctggtcctcaaggacaaggcggacgacgagatcggcagctacaagaacgcgctccagctgaccaacaacttcacggacctcaagtccatcggcaagcagacgggcttcctgttctacgtgccggcgtggaacacctccaagatcgacccggaaaccggcttcgtcgacctgctcaagccgcgctacgagaacatcgcgcagtcccaggcgttcttcggcaagttcgacaagatctgctacaacaccgacaagggctacttcgagttccacatcgactacgcgaagttcaccgacaaggccaagaactccaggcagaagtgggccatctgcagccacggcgacaagcgctacgtgtacgacaagacggcgaaccagaacaagggcgcggccaagggcatcaacgtgaacgacgagctgaagtccctcttcgcgcgctaccacatcaacgacaagcagccgaacctcgtcatggacatctgccagaacaacgacaaggagttccacaagagcctgatgtgcctgctcaagaccctgctccagatgaggaactcgaacgccgcgaccggcgaggactacatcctcagccccgtcgcgaacgacgagggcgtgttcttcaactccgccctcgcggacgacacgcagccgcagaacgccgacgcgaacggcgcctaccacatcgccctcaagggcctgtggctgctcaacgagctcaagaactccgacgacctgaacaaggtgaagctcgccattgacaaccagacgtggctgaatttcgctcagaatagggggggcgggggctcaggcgggggcgggagcggcggcgggggctctgggggcggcggcagcggcgggggcggcagcgggggcggcgggtcgccgaagaagaagcgcaaggtgtccggcggcagctccggcggcagcccgaagaagaagcgcaaagtgtgagggacccgatcgttcaaacatttggcaataaagtttcttaagattgaatcctgttgccggtcttgcgatgattatcatataatttctgttgaattacgttaagcatgtaataattaacatgtaatgcatgacgttatttatgagatgggtttttatgattagagtcccgcaattatacatttaatacgcgatagaaaacaaaatatagcgcgcaaactaggataaattatcgcgcgcggtgtcatctatgttactagatcggtaccgaattcattatgtggtctaggtaggttctatatataagaaaacttgaaatgttctaaaaaaaaattcaagcccatgcatgattgaagcaaacggtatagcaacggtgttaacctgatctagtgatctcttgcaatccttaacggccacctaccgcaggtagcaaacggcgtccccctcctcgatatctccgcggcgacctctggctttttccgcggaattgcgcggtggggacggattccacgagaccgcgacgcaaccgcctctcgccgctgggccccacaccgctcggtgccgtagcctcacgggactctttctccctcctcccccgttataaattggcttcatcccctccttgcctcatccatccaaatcccagtccccaatcccatcccttcgtaggagaaattcatcgaagctaagcgaatcctcgcgatcctctcaaggtactgcgagttttcgatccccctctcgacccctcgtatgtttgtgtttgtcgtagcgtttgattaggtatgctttccctgtttgtgttcgtcgtagcgtttgattaggtatgctttccctgttcgtgttcatcgtagtgtttgattaggtcgtgtgaggcgatggcctgctcgcgtccttcgatctgtagtcgatttgcgggtcgtggtgtagatctgcgggctgtgatgaagttatttggtgtgatctgctcgcctgattctgcgggttggctcgagtagatatgatggttggaccggttggttcgtttaccgcgctagggttgggctgggatgatgttgcatgcgccgttgcgcgtgatcccgcagcaggacttgcgtttgattgccagatctcgttacgattatgtgatttggtttggactttttagatctgtagcttctgcttatgtgccagatgcgcctactgctcatatgcctgatgataatcataaatggctgtggaactaactagttgattgcggagtcatgtatcagctacaggtgtagggactagctacaggtgtagggacttgcgtctaattgtttggtcctttactcatgttgcaattatgcaatttagtttagattgtttgttccactcatctaggctgtaaaagggacactgcttagattgctgtttaatctttttagtagattatattatattggtaacttattacccctattacatgccatacgtgacttctgctcatgcctgatgataatcatagatcactgtggaattaattagttgattgttgaatcatgtttcatgtacataccacggcacaattgcttagttccttaacaaatgcaaattttactgatccatgtatgatttgcgtggttctctaatgtgaaatactatagctacttgttagtaagaatcaggttcgtatgcttaatgctgtatgtgccttctgctcatgcctgatgataatcatatatcactggaattaattagttgatcgtttaatcatatatcaagtacataccatgccacaatttttagtcacttaacccatgcagattgaactggtccctgcatgttttgctaaattgttctattctgattagaccatatatcatgtatttttttttggtaatggttctcttattttaaatgctatatagttctggtacttgttagaaagatctgcttcatagtttagttgcctatccctcgaattaggatgctgagcagctgatcctatagctttgtttcatgtatcaattcttttgtgttcaacagtcagtttttgttagattcattgtaacttatggtcgcttactcttctggtcctcaatgcttgcagaagcttgaaattctgatgagtccgtgaggacgaaacgagtaagctcgtcaatttctactgtttgtagatgggaaagaccgaggagaagatctaatttctactgtttgtagatgcaccaaggaaggggaggagatcaatttctactgtttgtagatgtcacagatcacaaacttcaaatgaatttctactgtttgtagatacgcccagaaagcatacgcagtcggccggcatggtcccagcctcctcgctggcgccggctgggcaacatgcttcggcatggcgaatgggacgatcgttcaaacatttggcaataaagtttcttaagattgaatcctgttgccggtcttgcgatgattatcatataatttctgttgaattacgttaagcatgtaataattaacatgtaatgcatgacgttatttatgagatgggtttttatgattagagtcccgcaattatacatttaatacgcgatagaaaacaaaatatagcgcgcaaactaggataaattatcgcgcgcggtgtcatctatgttactagatccctaggctgcagtgcagcgtgacccggtcgtgcccctctctagagataatgagcattgcatgtctaagttataaaaaattaccacatattttttttgtcacacttgtttgaagtgcagtttatctatctttatacatatatttaaactttactctacgaataatataatctatagtactacaataatatcagtgttttagagaatcatataaatgaacagttagacatggtctaaaggacaattgagtattttgacaacaggactctacagttttatctttttagtgtgcatgtgttctcctttttttttgcaaatagcttcacctatataatacttcatccattttattagtacatccatttagggtttagggttaatggtttttatagactaatttttttagtacatctattttattctattttagcctctaaattaagaaaactaaaactctattttagtttttttatttaataatttagatataaaatagaataaaataaagtgactaaaaattaaacaaataccctttaagaaattaaaaaaactaaggaaacatttttcttgtttcgagtagataatgccagcctgttaaacgccgtcgacgagtctaacggacaccaaccagcgaaccagcagcgtcgcgtcgggccaagcgaagcagacggcacggcatctctgtcgctgcctctggacccctctcgagagttccgctccaccgttggacttgctccgctgtcggcatccagaaattgcgtggcggagcggcagacgtgagccggcacggcaggcggcctcctcctcctctcacggcaccggcagctacgggggattcctttcccaccgctccttcgctttcccttcctcgcccgccgtaataaatagacaccccctccacaccctctttccccaacctcgtgttgttcggagcgcacacacacacaaccagatctcccccaaatccacccgtcggcacctccgcttcaaggtacgccgctcgtcctccccccccccccctctctaccttctctagatcggcgttccggtccatggttagggcccggtagttctacttctgttcatgtttgtgttagatccgtgtttgtgttagatccgtgctgctagcgttcgtacacggatgcgacctgtacgtcagacacgttctgattgctaacttgccagtgtttctctttggggaatcctgggatggctctagccgttccgcagacgggatcgatttcatgattttttttgtttcgttgcatagggtttggtttgcccttttcctttatttcaatatatgccgtgcacttgtttgtcgggtcatcttttcatgcttttttttgtcttggttgtgatgatgtggtctggttgggcggtcgttctagatcggagtagaattctgtttcaaactacctggtggatttattaattttggatctgtatgtgtgtgccatacatattcatagttacgaattgaagatgatggatggaaatatcgatctaggataggtatacatgttgatgcgggttttactgatgcatatacagagatgctttttgttcgcttggttgtgatgatgtggtgtggttgggcggtcgttcattcgttctagatcggagtagaatactgtttcaaactacctggtgtatttattaattttggaactgtatgtgtgtgtcatacatcttcatagttacgagtttaagatggatggaaatatcgatctaggataggtatacatgttgatgtgggttttactgatgcatatacatgatggcatatgcagcatctattcatatgctctaaccttgagtacctatctattataataaacaagtatgttttataattattttgatcttgatatacttggatgatggcatatgcagcagctatatgtggatttttttagccctgccttcatacgctatttatttgcttggtactgtttcttttgtcgatgctcaccctgttgtttggtgttacttctgcagggatcaccgatcatgcaaaaactcattaactcagtgcaaaactatgcctggggcagcaaaacggcgttgactgaactttatggtatggaaaatccgtccagccagccgatggccgagctgtggatgggcgcacatccgaaaagcagttcacgagtgcagaatgccgccggagatatcgtttcactgcgtgatgtgattgagagtgataaatcgactctgctcggagaggccgttgccaaacgctttggcgaactgcctttcctgttcaaagtattatgcgcagcacagccactctccattcaggttcatccaaacaaacacaattctgaaatcggttttgccaaagaaaatgccgcaggtatcccgatggatgccgccgagcgtaactataaagatcctaaccacaagccggagctggtttttgcgctgacgcctttccttgcgatgaacgcgtttcgtgaattttccgagattgtctccctactccagccggtcgcaggtgcacatccggcgattgctcactttttacaacagcctgatgccgaacgtttaagcgaactgttcgccagcctgttgaatatgcagggtgaagaaaaatcccgcgcgctggcgattttaaaatcggccctcgatagccagcagggtgaaccgtggcaaacgattcgtttaatttctgaattttacccggaagacagcggtctgttctccccgctattgctgaatgtggtgaaattgaaccctggcgaagcgatgttcctgttcgctgaaacaccgcacgcttacctgcaaggcgtggcgctggaagtgatggcaaactccgataacgtgctgcgtgcgggtctgacgcctaaatacattgatattccggaactggttgccaatgtgaaattcgaagccaaaccggctaaccagttgttgacccagccggtgaaacaaggtgcagaactggacttcccgattccagtggatgattttgccttctcgctgcatgaccttagtgataaagaaaccaccattagccagcagagtgccgccattttgttctgcgtcgaaggcgatgcaacgttgtggaaaggttctcagcagttacagcttaaaccgggtgaatcagcgtttattgccgccaacgaatcaccggtgactgtcaaaggccacggccgtttagcgcgtgtttacaacaagctgtaagagcttactgaaaaaattaacatctcttgctaagctgggagctcgatccgtcgacctgcagatcgttcaaacatttggcaataaagtttcttaagattgaatcctgttgccggtcttgcgatgattatcatataatttctgttgaattacgttaagcatgtaataattaacatgtaatgcatgacgttatttatgagatgggtttttatgattagagtcccgcaattatacatttaatacgcgatagaaaacaaaatatagcgcgcaaactaggataaattatcgcgcgcggtgtcatctatgttactagatccggaccgcctgcaggcccgggggcgcgccctaattagctaacggccaggatcgccgcgtgagcctttagcaactagctagattaattaacgcaatctgttattaagttgtctaagcgtcaatttgtttacaccacaatatatcctgccaccagccagccaacagctccccgaccggcagctcggcacaaaatcaccactcgatacaggcagcccatcagaattaattctcatgtttgacagcttatcatcgactgcacggtgcaccaatgcttctggcgtcaggcagccatcggaagctgtggtatggctgtgcaggtcgtaaatcactgcataattcgtgtcgctcaaggcgcactcccgttctggataatgttttttgcgccgacatcataacggttctggcaaatattctgaaatgagctgttgacaattaatcatccggctcgtataatgtgtggaattgtgagcggataacaatttcacacaggaaacagaccatgagggaagcgttgatcgccgaagtatcgactcaactatcagaggtagttggcgtcatcgagcgccatctcgaaccgacgttgctggccgtacatttgtacggctccgcagtggatggcggcctgaagccacacagtgatattgatttgctggttacggtgaccgtaaggcttgatgaaacaacgcggcgagctttgatcaacgaccttttggaaacttcggcttcccctggagagagcgagattctccgcgctgtagaagtcaccattgttgtgcacgacgacatcattccgtggcgttatccagctaagcgcgaactgcaatttggagaatggcagcgcaatgacattcttgcaggtatcttcgagccagccacgatcgacattgatctggctatcttgctgacaaaagcaagagaacatagcgttgccttggtaggtccagcggcggaggaactctttgatccggttcctgaacaggatctatttgaggcgctaaatgaaaccttaacgctatggaactcgccgcccgactgggctggcgatgagcgaaatgtagtgcttacgttgtcccgcatttggtacagcgcagtaaccggcaaaatcgcgccgaaggatgtcgctgccgactgggcaatggagcgcctgccggcccagtatcagcccgtcatacttgaagctaggcaggcttatcttggacaagaagatcgcttggcctcgcgcgcagatcagttggaagaatttgttcactacgtgaaaggcgagatcaccaaagtagtcggcaaataaagctctagtggatctccgtacccagggatctggctcgcggcggacgcacgacgccggggcgagaccataggcgatctcctaaatcaatagtagctgtaacctcgaagcgtttcacttgtaacaacgattgagaatttttgtcataaaattgaaatacttggttcgcatttttgtcatccgcggtcagccgcaattctgacgaactgcccatttagctggagatgattgtacatccttcacgtgaaaatttctcaagcgctgtgaacaagggttcagattttagattgaaaggtgagccgttgaaacacgttcttcttgtcgatgacgacgtcgctatgcggcatcttattattgaataccttacgatccacgccttcaaagtgaccgcggtagccgacagcacccagttcacaagagtactctcttccgcgacggtcgatgtcgtggttgttgatctagatttaggtcgtgaagatgggctcgagatcgttcgtaatctggcggcaaagtctgatattccaatcataattatcagtggcgaccgccttgaggagacggataaagttgttgcactcgagctaggagcaagtgattttatcgctaagccgttcagtatcagagagtttctagcacgcattcgggttgccttgcgcgtgcgccccaacgttgtccgctccaaagaccgacggtctttttgttttactgactggacacttaatctcaggcaacgtcgcttgatgtccgaagctggcggtgaggtgaaacttacggcaggtgagttcaatcttctcctcgcgtttttagagaaaccccgcgacgttctatcgcgcgagcaacttctcattgccagtcgagtacgcgacgaggaggtttatgacaggagtatagatgttctcattttgaggctgcgccgcaaacttgaggcagatccgtcaagccctcaactgataaaaacagcaagaggtgccggttatttctttgacgcggacgtgcaggtttcgcacggggggacgatggcagcctgagccaattcccagatccccgaggaatcggcgtgagcggtcgcaaaccatccggcccggtacaaatcggcgcggcgctgggtgatgacctggtggagaagttgaaggccgcgcaggccgcccagcggcaacgcatcgaggcagaagcacgccccggtgaatcgtggcaagcggccgctgatcgaatccgcaaagaatcccggcaaccgccggcagccggtgcgccgtcgattaggaagccgcccaagggcgacgagcaaccagattttttcgttccgatgctctatgacgtgggcacccgcgatagtcgcagcatcatggacgtggccgttttccgtctgtcgaagcgtgaccgacgagctggcgaggtgatccgctacgagcttccagacgggcacgtagaggtttccgcagggccggccggcatggccagtgtgtgggattacgacctggtactgatggcggtttcccatctaaccgaatccatgaaccgataccgggaagggaagggagacaagcccggccgcgtgttccgtccacacgttgcggacgtactcaagttctgccggcgagccgatggcggaaagcagaaagacgacctggtagaaacctgcattcggttaaacaccacgcacgttgccatgcagcgtacgaagaaggccaagaacggccgcctggtgacggtatccgagggtgaagccttgattagccgctacaagatcgtaaagagcgaaaccgggcggccggagtacatcgagatcgagctggctgattggatgtaccgcgagatcacagaaggcaagaacccggacgtgctgacggttcaccccgattactttttgatcgatcccggcatcggccgttttctctaccgcctggcacgccgcgccgcaggcaaggcagaagccagatggttgttcaagacgatctacgaacgcagtggcagcgccggagagttcaagaagttctgtttcaccgtgcgcaagctgatcgggtcaaatgacctgccggagtacgatttgaaggaggaggcggggcaggctggcccgatcctagtcatgcgctaccgcaacctgatcgagggcgaagcatccgccggttcctaatgtacggagcagatgctagggcaaattgccctagcaggggaaaaaggtcgaaaaggtctctttcctgtggatagcacgtacattgggaacccaaagccgtacattgggaaccggaacccgtacattgggaacccaaagccgtacattgggaaccggtcacacatgtaagtgactgatataaaagagaaaaaaggcgatttttccgcctaaaactctttaaaacttattaaaactcttaaaacccgcctggcctgtgcataactgtctggccagcgcacagccgaagagctgcaaaaagcgcctacccttcggtcgctgcgctccctacgccccgccgcttcgcgtcggcctatcgcggccgctggccgctcaaaaatggctggcctacggccaggcaatctaccagggcgcggacaagccgcgccgtcgccactcgaccgccggcgctgaggtctgcctcgtgaagaaggtgttgctgactcataccaggcctgaatcgccccatcatccagccagaaagtgagggagccacggttgatgagagctttgttgtaggtggaccagttggtgattttgaacttttgctttgccacggaacggtctgcgttgtcgggaagatgcgtgatctgatccttcaactcagcaaaagttcgatttattcaacaaagccgccgtcccgtcaagtcagcgtaatgctctgccagtgttacaaccaattaaccaattctgattagaaaaactcatcgagcatcaaatgaaactgcaatttattcatatcaggattatcaataccatatttttgaaaaagccgtttctgtaatgaaggagaaaactcaccgaggcagttccataggatggcaagatcctggtatcggtctgcgattccgactcgtccaacatcaatacaacctattaatttcccctcgtcaaaaataaggttatcaagtgagaaatcaccatgagtgacgactgaatccggtgagaatggcaaaagctctgcattaatgaatcggccaacgcgcggggagaggcggtttgcgtattgggcgctcttccgcttcctcgctcactgactcgctgcgctcggtcgttcggctgcggcgagcggtatcagctcactcaaaggcggtaatacggttatccacagaatcaggggataacgcaggaaagaacatgtgagcaaaaggccagcaaaaggccaggaaccgtaaaaaggccgcgttgctggcgtttttccataggctccgcccccctgacgagcatcacaaaaatcgacgctcaagtcagaggtggcgaaacccgacaggactataaagataccaggcgtttccccctggaagctccctcgtgcgctctcctgttccgaccctgccgcttaccggatacctgtccgcctttctcccttcgggaagcgtggcgctttctcatagctcacgctgtaggtatctcagttcggtgtaggtcgttcgctccaagctgggctgtgtgcacgaaccccccgttcagcccgaccgctgcgccttatccggtaactatcgtcttgagtccaacccggtaagacacgacttatcgccactggcagcagccactggtaacaggattagcagagcgaggtatgtaggcggtgctacagagttcttgaagtggtggcctaactacggctacactagaagaacagtatttggtatctgcgctctgctgaagccagttaccttcggaaaaagagttggtagctcttgatccggcaaacaaaccaccgctggtagcggtggtttttttgtttgcaagcagcagattacgcgcagaaaaaaaggatctcaagaagatcctttgatcttttctacggggtctgacgctcagtggaacgaaaactcacgttaagggattttggtcatgagattatcaaaaaggatcttcacctagatccttttgatccggaatta

SEQ ID NO: 112 - DNA, 17504 bp, synthetic construct
  source 1..17504: mol_type = other DNA
attcctgtggttggcatgcacatacaaatggacgaacggataaaccttttcacgcccttttaaatatccgattattctaataaacgctcttttctcttaggtttacccgccaatatatcctgtcaaacactgatagtttaaactggcactagcctaacggtgttgactaactaggccgcttccctaattagctaacccgggggcgcgccgggaccggaattcattatgtggtctaggtaggttctatatataagaaaacttgaaatgttctaaaaaaaaattcaagcccatgcatgattgaagcaaacggtatagcaacggtgttaacctgatctagtgatctcttgcaatccttaacggccacctaccgcaggtagcaaacggcgtccccctcctcgatatctccgcggcgacctctggctttttccgcggaattgcgcggtggggacggattccacgagaccgcgacgcaaccgcctctcgccgctgggccccacaccgctcggtgccgtagcctcacgggactctttctccctcctcccccgttataaattggcttcatcccctccttgcctcatccatccaaatcccagtccccaatcccatcccttcgtaggagaaattcatcgaagctaagcgaatcctcgcgatcctctcaaggtactgcgagttttcgatccccctctcgacccctcgtatgtttgtgtttgtcgtagcgtttgattaggtatgctttccctgtttgtgttcgtcgtagcgtttgattaggtatgctttccctgttcgtgttcatcgtagtgtttgattaggtcgtgtgaggcgatggcctgctcgcgtccttcgatctgtagtcgatttgcgggtcgtggtgtagatctgcgggctgtgatgaagttatttggtgtgatctgctcgcctgattctgcgggttggctcgagtagatatgatggttggaccggttggttcgtttaccgcgctagggttgggctgggatgatgttgcatgcgccgttgcgcgtgatcccgcagcaggacttgcgtttgattgccagatctcgttacgattatgtgatttggtttggactttttagatctgtagcttctgcttatgtgccagatgcgcctactgctcatatgcctgatgataatcataaatggctgtggaactaactagttgattgcggagtcatgtatcagctacaggtgtagggactagctacaggtgtagggacttgcgtctaattgtttggtcctttactcatgttgcaattatgcaatttagtttagattgtttgttccactcatctaggctgtaaaagggacactgcttagattgctgtttaatctttttagtagattatattatattggtaacttattacccctattacatgccatacgtgacttctgctcatgcctgatgataatcatagatcactgtggaattaattagttgattgttgaatcatgtttcatgtacataccacggcacaattgcttagttccttaacaaatgcaaattttactgatccatgtatgatttgcgtggttctctaatgtgaaatactatagctacttgttagtaagaatcaggttcgtatgcttaatgctgtatgtgccttctgctcatgcctgatgataatcatatatcactggaattaattagttgatcgtttaatcatatatcaagtacataccatgccacaatttttagtcacttaacccatgcagattgaactggtccctgcatgttttgctaaattgttctattctgattagaccatatatcatgtatttttttttggtaatggttctcttattttaaatgctatatagttctggtacttgttagaaagatctgcttcatagtttagttgcctatccctcgaattaggatgctgagcagctgatcctatagctttgtttcatgtatcaattcttttgtgttcaacagtcagtttttgttagattcattgtaacttatggtcgcttactcttctggtcctcaatgcttgcagggatcccctaaatagaccatgccgaagaagaagcgcaaggtcgggggcgggggctcaggcgggggcgggagcggcggcgggggctctgggggcggcggcagcggcgggggcggcagcgggggcggcgggtcgatgctgttccaggatttcactcatctgtaccctctctcaaagactgttcggttcgagctcaagcctattgggcggactctggagcacatccacgcgaagaacttcctcagccaggacgaaaccatggccgacatgtaccagaaggtcaaggtcatcctcgacgactaccacagggacttcatcgcggacatgatgggcgaggtgaagctgacgaagctcgccgagttctacgacgtctacctcaagttccgcaagaacccgaaggacgacggcctccagaagcagctcaaggacctgcaggccgtcctgaggaaggagtccgtcaagcccatcggcagcggcggcaagtacaagaccggctacgacaggctgttcggcgccaagctgttcaaggacggcaaggagctcggcgacctggcgaagttcgtgatcgcgcaggagggcgagagctcccccaagctggcccacctggcccacttcgagaagttcagcacgtacttcaccggcttccacaggaacaggaagaacatgtacagcgacgaggacaagcacacggccatcgcctaccgcctcatccacgagaacctgccccgcttcatcgacaacctgcagatcctgacgaccatcaagcagaagcactccgccctgtacgaccagatcatcaacgagctcaccgcgagcggcctcgacgtgtccctcgccagccacctcgacggctaccacaagctcctgacccaggagggcatcaccgcctacaaccgcatcatcggcgaggtgaacggctacaccaacaagcacaaccagatctgccacaagtccgagaggatcgccaagctcaggcccctgcacaagcagatcctcagcgacggcatgggcgtgagcttcctcccgtccaagttcgccgacgactccgagatgtgccaggccgtgaacgagttctacaggcactacaccgacgtgttcgccaaggtgcagtccctgttcgacggcttcgacgaccaccagaaggacggcatctacgtggagcacaagaacctgaacgagctgtccaagcaggccttcggcgactgggccctcctgggccgcgtgctggacggctactacgtggacgtcgtgaacccggagttcaacgagcgcttcgcgaaggcgaagacggacaacgcgaaggccaagctcaccaaggagaaggacaagttcatcaagggcgtccacagcctcgcgtccctggagcaggcgatcgagcaccacaccgcgcgccacgacgacgagtccgtgcaggccggcaagctcggccagtacttcaagcacggcctggccggcgtcgacaacccgatccagaagatccacaacaaccactccaccatcaagggcttcctggagagggagcgcccggcgggcgagcgcgcgctccccaagatcaagtccggcaagaaccccgagatgacgcagctcaggcagctgaaggagctgctcgacaacgcgctcaacgtggcgcacttcgccaagctgctcacgaccaagaccacgctggacaaccaggacggcaacttctacggcgagttcggcgtcctgtacgacgagctggcgaagatcccgaccctgtacaacaaggtccgcgactacctgagccagaagcccttctccaccgagaagtacaagctcaacttcggcaacccgaccctcctgaacggctgggacctcaacaaggagaaggacaacttcggcgtgatcctccagaaggacggctgctactacctcgccctgctggacaaggcgcacaagaaggtcttcgacaacgccccgaacaccggcaagaacgtgtaccagaagatggtgtacaagctgctccccggccccaacaagatgctgccgaaggtgttcttcgcgaagtccaacctcgactactacaaccccagcgccgagctcctggacaagtacgccaagggcacgcacaagaagggcgacaacttcaacctcaaggactgccacgcgctgatcgacttcttcaaggcgggcatcaacaagcaccccgagtggcagcacttcggcttcaagttcagcccgacctccagctacagggacctcagcgacttctaccgcgaggtggagccccagggctaccaggtgaagttcgtcgacatcaacgccgactacatcgacgagctcgtcgagcagggcaagctctacctgttccagatctacaacaaggacttctccccgaaggcccacggcaagccgaacctccacacgctctacttcaaggccctcttcagcgaggacaacctggccgacccgatctacaagctcaacggcgaggcgcagatcttctaccgcaaggccagcctggacatgaacgaaacgaccatccacagggccggcgaggtcctggagaacaagaacccggacaacccgaagaagaggcagttcgtctacgacatcatcaaggacaagaggtacacccaggacaagttcatgctccacgtcccgatcaccatgaacttcggcgtccagggcatgaccatcaaggagttcaacaagaaggtcaaccagagcatccagcagtacgacgaggtgaacgtcatcggcatcgaccgcggcgagaggcacctgctctacctgacggtcatcaactccaagggcgagatcctcgagcagcgcagcctgaacaccatccagcagttcgactaccagaagaagctggacaacagggagaaggagagggtggccgcccgcaaggcctggggcgagatcgaaacgatcaaggagctcaagtccggctacctcagccacgtcgtgcaccagatcaaccagctcatgctgaagtacaacgcgatcgtggtcctcgaggacctgaacttcggcttcaagaggggccgcttcaaggtggagaagcagatctaccagaacttcgagaacgccctgatcaagaagctcaaccacctggtcctcaaggacaaggcggacgacgagatcggcagctacaagaacgcgctccagctgaccaacaacttcacggacctcaagtccatcggcaagcagacgggcttcctgttctacgtgccggcgtggaacacctccaagatcgacccggaaaccggcttcgtcgacctgctcaagccgcgctacgagaacatcgcgcagtcccaggcgttcttcggcaagttcgacaagatctgctacaacaccgacaagggctacttcgagttccacatcgactacgcgaagttcaccgacaaggccaagaactccaggcagaagtgggccatctgcagccacggcgacaagcgctacgtgtacgacaagacggcgaaccagaacaagggcgcggccaagggcatcaacgtgaacgacgagctgaagtccctcttcgcgcgctaccacatcaacgacaagcagccgaacctcgtcatggacatctgccagaacaacgacaaggagttccacaagagcctgatgtgcctgctcaagaccctgctccagatgaggaactcgaacgccgcgaccggcgaggactacatcctcagccccgtcgcgaacgacgagggcgtgttcttcaactccgccctcgcggacgacacgcagccgcagaacgccgacgcgaacggcgcctaccacatcgccctcaagggcctgtggctgctcaacgagctcaagaactccgacgacctgaacaaggtgaagctcgccattgacaaccagacgtggctgaatttcgctcagaatagggggggcgggggctcaggcgggggcgggagcggcggcgggggctctgggggcggcggcagcggcgggggcggcagcgggggcggcgggtcgccgaagaagaagcgcaaggtgtccggcggcagctccggcggcagcccgaagaagaagcgcaaagtgtgagggacccgatcgttcaaacatttggcaataaagtttcttaagattgaatcctgttgccggtcttgcgatgattatcatataatttctgttgaattacgttaagcatgtaataattaacatgtaatgcatgacgttatttatgagatgggtttttatgattagagtcccgcaattatacatttaatacgcgatagaaaacaaaatatagcgcgcaaactaggataaattatcgcgcgcggtgtcatctatgttactagatcggtaccgaattcattatgtggtctaggtaggttctatatataagaaaacttgaaatgttctaaaaaaaaattcaagcccatgcatgattgaagcaaacggtatagcaacggtgttaacctgatctagtgatctcttgcaatccttaacggccacctaccgcaggtagcaaacggcgtccccctcctcgatatctccgcggcgacctctggctttttccgcggaattgcgcggtggggacggattccacgagaccgcgacgcaaccgcctctcgccgctgggccccacaccgctcggtgccgtagcctcacgggactctttctccctcctcccccgttataaattggcttcatcccctccttgcctcatccatccaaatcccagtccccaatcccatcccttcgtaggagaaattcatcgaagctaagcgaatcctcgcgatcctctcaaggtactgcgagttttcgatccccctctcgacccctcgtatgtttgtgtttgtcgtagcgtttgattaggtatgctttccctgtttgtgttcgtcgtagcgtttgattaggtatgctttccctgttcgtgttcatcgtagtgtttgattaggtcgtgtgaggcgatggcctgctcgcgtccttcgatctgtagtcgatttgcgggtcgtggtgtagatctgcgggctgtgatgaagttatttggtgtgatctgctcgcctgattctgcgggttggctcgagtagatatgatggttggaccggttggttcgtttaccgcgctagggttgggctgggatgatgttgcatgcgccgttgcgcgtgatcccgcagcaggacttgcgtttgattgccagatctcgttacgattatgtgatttggtttggactttttagatctgtagcttctgcttatgtgccagatgcgcctactgctcatatgcctgatgataatcataaatggctgtggaactaactagttgattgcggagtcatgtatcagctacaggtgtagggactagctacaggtgtagggacttgcgtctaattgtttggtcctttactcatgttgcaattatgcaatttagtttagattgtttgttccactcatctaggctgtaaaagggacactgcttagattgctgtttaatctttttagtagattatattatattggtaacttattacccctattacatgccatacgtgacttctgctcatgcctgatgataatcatagatcactgtggaattaattagttgattgttgaatcatgtttcatgtacataccacggcacaattgcttagttccttaacaaatgcaaattttactgatccatgtatgatttgcgtggttctctaatgtgaaatactatagctacttgttagtaagaatcaggttcgtatgcttaatgctgtatgtgccttctgctcatgcctgatgataatcatatatcactggaattaattagttgatcgtttaatcatatatcaagtacataccatgccacaatttttagtcacttaacccatgcagattgaactggtccctgcatgttttgctaaattgttctattctgattagaccatatatcatgtatttttttttggtaatggttctcttattttaaatgctatatagttctggtacttgttagaaagatctgcttcatagtttagttgcctatccctcgaattaggatgctgagcagctgatcctatagctttgtttcatgtatcaattcttttgtgttcaacagtcagtttttgttagattcattgtaacttatggtcgcttactcttctggtcctcaatgcttgcagaagcttgaaattctgatgagtccgtgaggacgaaacgagtaagctcgtcaatttctactgtttgtagatgggaaagaccgaggagaagatctaatttctactgtttgtagatgcaccaaggaaggggaggagatcaatttctactgtttgtagatgtcacagatcacaaacttcaaatgaatttctactgtttgtagatacgcccagaaagcatacgcagtcggccggcatggtcccagcctcctcgctggcgccggctgggcaacatgcttcggcatggcgaatgggacgatcgttcaaacatttggcaataaagtttcttaagattgaatcctgttgccggtcttgcgatgattatcatataatttctgttgaattacgttaagcatgtaataattaacatgtaatgcatgacgttatttatgagatgggtttttatgattagagtcccgcaattatacatttaatacgcgatagaaaacaaaatatagcgcgcaaactaggataaattatcgcgcgcggtgtcatctatgttactagatccctaggctgcagtgcagcgtgacccggtcgtgcccctctctagagataatgagcattgcatgtctaagttataaaaaattaccacatattttttttgtcacacttgtttgaagtgcagtttatctatctttatacatatatttaaactttactctacgaataatataatctatagtactacaataatatcagtgttttagagaatcatataaatgaacagttagacatggtctaaaggacaattgagtattttgacaacaggactctacagttttatctttttagtgtgcatgtgttctcctttttttttgcaaatagcttcacctatataatacttcatccattttattagtacatccatttagggtttagggttaatggtttttatagactaatttttttagtacatctattttattctattttagcctctaaattaagaaaactaaaactctattttagtttttttatttaataatttagatataaaatagaataaaataaagtgactaaaaattaaacaaataccctttaagaaattaaaaaaactaaggaaacatttttcttgtttcgagtagataatgccagcctgttaaacgccgtcgacgagtctaacggacaccaaccagcgaaccagcagcgtcgcgtcgggccaagcgaagcagacggcacggcatctctgtcgctgcctctggacccctctcgagagttccgctccaccgttggacttgctccgctgtcggcatccagaaattgcgtggcggagcggcagacgtgagccggcacggcaggcggcctcctcctcctctcacggcaccggcagctacgggggattcctttcccaccgctccttcgctttcccttcctcgcccgccgtaataaatagacaccccctccacaccctctttccccaacctcgtgttgttcggagcgcacacacacacaaccagatctcccccaaatccacccgtcggcacctccgcttcaaggtacgccgctcgtcctccccccccccccctctctaccttctctagatcggcgttccggtccatggttagggcccggtagttctacttctgttcatgtttgtgttagatccgtgtttgtgttagatccgtgctgctagcgttcgtacacggatgcgacctgtacgtcagacacgttctgattgctaacttgccagtgtttctctttggggaatcctgggatggctctagccgttccgcagacgggatcgatttcatgattttttttgtttcgttgcatagggtttggtttgcccttttcctttatttcaatatatgccgtgcacttgtttgtcgggtcatcttttcatgcttttttttgtcttggttgtgatgatgtggtctggttgggcggtcgttctagatcggagtagaattctgtttcaaactacctggtggatttattaattttggatctgtatgtgtgtgccatacatattcatagttacgaattgaagatgatggatggaaatatcgatctaggataggtatacatgttgatgcgggttttactgatgcatatacagagatgctttttgttcgcttggttgtgatgatgtggtgtggttgggcggtcgttcattcgttctagatcggagtagaatactgtttcaaactacctggtgtatttattaattttggaactgtatgtgtgtgtcatacatcttcatagttacgagtttaagatggatggaaatatcgatctaggataggtatacatgttgatgtgggttttactgatgcatatacatgatggcatatgcagcatctattcatatgctctaaccttgagtacctatctattataataaacaagtatgttttataattattttgatcttgatatacttggatgatggcatatgcagcagctatatgtggatttttttagccctgccttcatacgctatttatttgcttggtactgtttcttttgtcgatgctcaccctgttgtttggtgttacttctgcagggatcaccgatcatgcaaaaactcattaactcagtgcaaaactatgcctggggcagcaaaacggcgttgactgaactttatggtatggaaaatccgtccagccagccgatggccgagctgtggatgggcgcacatccgaaaagcagttcacgagtgcagaatgccgccggagatatcgtttcactgcgtgatgtgattgagagtgataaatcgactctgctcggagaggccgttgccaaacgctttggcgaactgcctttcctgttcaaagtattatgcgcagcacagccactctccattcaggttcatccaaacaaacacaattctgaaatcggttttgccaaagaaaatgccgcaggtatcccgatggatgccgccgagcgtaactataaagatcctaaccacaagccggagctggtttttgcgctgacgcctttccttgcgatgaacgcgtttcgtgaattttccgagattgtctccctactccagccggtcgcaggtgcacatccggcgattgctcactttttacaacagcctgatgccgaacgtttaagcgaactgttcgccagcctgttgaatatgcagggtgaagaaaaatcccgcgcgctggcgattttaaaatcggccctcgatagccagcagggtgaaccgtggcaaacgattcgtttaatttctgaattttacccggaagacagcggtctgttctccccgctattgctgaatgtggtgaaattgaaccctggcgaagcgatgttcctgttcgctgaaacaccgcacgcttacctgcaaggcgtggcgctggaagtgatggcaaactccgataacgtgctgcgtgcgggtctgacgcctaaatacattgatattccggaactggttgccaatgtgaaattcgaagccaaaccggctaaccagttgttgacccagccggtgaaacaaggtgcagaactggacttcccgattccagtggatgattttgccttctcgctgcatgaccttagtgataaagaaaccaccattagccagcagagtgccgccattttgttctgcgtcgaaggcgatgcaacgttgtggaaaggttctcagcagttacagcttaaaccgggtgaatcagcgtttattgccgccaacgaatcaccggtgactgtcaaaggccacggccgtttagcgcgtgtttacaacaagctgtaagagcttactgaaaaaattaacatctcttgctaagctgggagctcgatccgtcgacctgcagatcgttcaaacatttggcaataaagtttcttaagattgaatcctgttgccggtcttgcgatgattatcatataatttctgttgaattacgttaagcatgtaataattaacatgtaatgcatgacgttatttatgagatgggtttttatgattagagtcccgcaattatacatttaatacgcgatagaaaacaaaatatagcgcgcaaactaggataaattatcgcgcgcggtgtcatctatgttactagatccggaccgcctgcaggcccgggggcgcgccctaattagctaacggccaggatcgccgcgtgagcctttagcaactagctagattaattaacgcaatctgttattaagttgtctaagcgtcaatttgtttacaccacaatatatcctgccaccagccagccaacagctccccgaccggcagctcggcacaaaatcaccactcgatacaggcagcccatcagaattaattctcatgtttgacagcttatcatcgactgcacggtgcaccaatgcttctggcgtcaggcagccatcggaagctgtggtatggctgtgcaggtcgtaaatcactgcataattcgtgtcgctcaaggcgcactcccgttctggataatgttttttgcgccgacatcataacggttctggcaaatattctgaaatgagctgttgacaattaatcatccggctcgtataatgtgtggaattgtgagcggataacaatttcacacaggaaacagaccatgagggaagcgttgatcgccgaagtatcgactcaactatcagaggtagttggcgtcatcgagcgccatctcgaaccgacgttgctggccgtacatttgtacggctccgcagtggatggcggcctgaagccacacagtgatattgatttgctggttacggtgaccgtaaggcttgatgaaacaacgcggcgagctttgatcaacgaccttttggaaacttcggcttcccctggagagagcgagattctccgcgctgtagaagtcaccattgttgtgcacgacgacatcattccgtggcgttatccagctaagcgcgaactgcaatttggagaatggcagcgcaatgacattcttgcaggtatcttcgagccagccacgatcgacattgatctggctatcttgctgacaaaagcaagagaacatagcgttgccttggtaggtccagcggcggaggaactctttgatccggttcctgaacaggatctatttgaggcgctaaatgaaaccttaacgctatggaactcgccgcccgactgggctggcgatgagcgaaatgtagtgcttacgttgtcccgcatttggtacagcgcagtaaccggcaaaatcgcgccgaaggatgtcgctgccgactgggcaatggagcgcctgccggcccagtatcagcccgtcatacttgaagctaggcaggcttatcttggacaagaagatcgcttggcctcgcgcgcagatcagttggaagaatttgttcactacgtgaaaggcgagatcaccaaagtagtcggcaaataaagctctagtggatctccgtacccagggatctggctcgcggcggacgcacgacgccggggcgagaccataggcgatctcctaaatcaatagtagctgtaacctcgaagcgtttcacttgtaacaacgattgagaatttttgtcataaaattgaaatacttggttcgcatttttgtcatccgcggtcagccgcaattctgacgaactgcccatttagctggagatgattgtacatccttcacgtgaaaatttctcaagcgctgtgaacaagggttcagattttagattgaaaggtgagccgttgaaacacgttcttcttgtcgatgacgacgtcgctatgcggcatcttattattgaataccttacgatccacgccttcaaagtgaccgcggtagccgacagcacccagttcacaagagtactctcttccgcgacggtcgatgtcgtggttgttgatctagatttaggtcgtgaagatgggctcgagatcgttcgtaatctggcggcaaagtctgatattccaatcataattatcagtggcgaccgccttgaggagacggataaagttgttgcactcgagctaggagcaagtgattttatcgctaagccgttcagtatcagagagtttctagcacgcattcgggttgccttgcgcgtgcgccccaacgttgtccgctccaaagaccgacggtctttttgttttactgactggacacttaatctcaggcaacgtcgcttgatgtccgaagctggcggtgaggtgaaacttacggcaggtgagttcaatcttctcctcgcgtttttagagaaaccccgcgacgttctatcgcgcgagcaacttctcattgccagtcgagtacgcgacgaggaggtttatgacaggagtatagatgttctcattttgaggctgcgccgcaaacttgaggcagatccgtcaagccctcaactgataaaaacagcaagaggtgccggttatttctttgacgcggacgtgcaggtttcgcacggggggacgatggcagcctgagccaattcccagatccccgaggaatcggcgtgagcggtcgcaaaccatccggcccggtacaaatcggcgcggcgctgggtgatgacctggtggagaagttgaaggccgcgcaggccgcccagcggcaacgcatcgaggcagaagcacgccccggtgaatcgtggcaagcggccgctgatcgaatccgcaaagaatcccggcaaccgccggcagccggtgcgccgtcgattaggaagccgcccaagggcgacgagcaaccagattttttcgttccgatgctctatgacgtgggcacccgcgatagtcgcagcatcatggacgtggccgttttccgtctgtcgaagcgtgaccgacgagctggcgaggtgatccgctacgagcttccagacgggcacgtagaggtttccgcagggccggccggcatggccagtgtgtgggattacgacctggtactgatggcggtttcccatctaaccgaatccatgaaccgataccgggaagggaagggagacaagcccggccgcgtgttccgtccacacgttgcggacgtactcaagttctgccggcgagccgatggcggaaagcagaaagacgacctggtagaaacctgcattcggttaaacaccacgcacgttgccatgcagcgtacgaagaaggccaagaacggccgcctggtgacggtatccgagggtgaagccttgattagccgctacaagatcgtaaagagcgaaaccgggcggccggagtacatcgagatcgagctggctgattggatgtaccgcgagatcacagaaggcaagaacccggacgtgctgacggttcaccccgattactttttgatcgatcccggcatcggccgttttctctaccgcctggcacgccgcgccgcaggcaaggcagaagccagatggttgttcaagacgatctacgaacgcagtggcagcgccggagagttcaagaagttctgtttcaccgtgcgcaagctgatcgggtcaaatgacctgccggagtacgatttgaaggaggaggcggggcaggctggcccgatcctagtcatgcgctaccgcaacctgatcgagggcgaagcatccgccggttcctaatgtacggagcagatgctagggcaaattgccctagcaggggaaaaaggtcgaaaaggtctctttcctgtggatagcacgtacattgggaacccaaagccgtacattgggaaccggaacccgtacattgggaacccaaagccgtacattgggaaccggtcacacatgtaagtgactgatataaaagagaaaaaaggcgatttttccgcctaaaactctttaaaacttattaaaactcttaaaacccgcctggcctgtgcataactgtctggccagcgcacagccgaagagctgcaaaaagcgcctacccttcggtcgctgcgctccctacgccccgccgcttcgcgtcggcctatcgcggccgctggccgctcaaaaatggctggcctacggccaggcaatctaccagggcgcggacaagccgcgccgtcgccactcgaccgccggcgctgaggtctgcctcgtgaagaaggtgttgctgactcataccaggcctgaatcgccccatcatccagccagaaagtgagggagccacggttgatgagagctttgttgtaggtggaccagttggtgattttgaacttttgctttgccacggaacggtctgcgttgtcgggaagatgcgtgatctgatccttcaactcagcaaaagttcgatttattcaacaaagccgccgtcccgtcaagtcagcgtaatgctctgccagtgttacaaccaattaaccaattctgattagaaaaactcatcgagcatcaaatgaaactgcaatttattcatatcaggattatcaataccatatttttgaaaaagccgtttctgtaatgaaggagaaaactcaccgaggcagttccataggatggcaagatcctggtatcggtctgcgattccgactcgtccaacatcaatacaacctattaatttcccctcgtcaaaaataaggttatcaagtgagaaatcaccatgagtgacgactgaatccggtgagaatggcaaaagctctgcattaatgaatcggccaacgcgcggggagaggcggtttgcgtattgggcgctcttccgcttcctcgctcactgactcgctgcgctcggtcgttcggctgcggcgagcggtatcagctcactcaaaggcggtaatacggttatccacagaatcaggggataacgcaggaaagaacatgtgagcaaaaggccagcaaaaggccaggaaccgtaaaaaggccgcgttgctggcgtttttccataggctccgcccccctgacgagcatcacaaaaatcgacgctcaagtcagaggtggcgaaacccgacaggactataaagataccaggcgtttccccctggaagctccctcgtgcgctctcctgttccgaccctgccgcttaccggatacctgtccgcctttctcccttcgggaagcgtggcgctttctcatagctcacgctgtaggtatctcagttcggtgtaggtcgttcgctccaagctgggctgtgtgcacgaaccccccgttcagcccgaccgctgcgccttatccggtaactatcgtcttgagtccaacccggtaagacacgacttatcgccactggcagcagccactggtaacaggattagcagagcgaggtatgtaggcggtgctacagagttcttgaagtggtggcctaactacggctacactagaagaacagtatttggtatctgcgctctgctgaagccagttaccttcggaaaaagagttggtagctcttgatccggcaaacaaaccaccgctggtagcggtggtttttttgtttgcaagcagcagattacgcgcagaaaaaaaggatctcaagaagatcctttgatcttttctacggggtctgacgctcagtggaacgaaaactcacgttaagggattttggtcatgagattatcaaaaaggatcttcacctagatccttttgatccggaatta

SEQ ID NO: 113 - DNA, 17504 bp, synthetic construct
  source 1..17504: mol_type = other DNA
attcctgtggttggcatgcacatacaaatggacgaacggataaaccttttcacgcccttttaaatatccgattattctaataaacgctcttttctcttaggtttacccgccaatatatcctgtcaaacactgatagtttaaactggcactagcctaacggtgttgactaactaggccgcttccctaattagctaacccgggggcgcgccgggaccggaattcattatgtggtctaggtaggttctatatataagaaaacttgaaatgttctaaaaaaaaattcaagcccatgcatgattgaagcaaacggtatagcaacggtgttaacctgatctagtgatctcttgcaatccttaacggccacctaccgcaggtagcaaacggcgtccccctcctcgatatctccgcggcgacctctggctttttccgcggaattgcgcggtggggacggattccacgagaccgcgacgcaaccgcctctcgccgctgggccccacaccgctcggtgccgtagcctcacgggactctttctccctcctcccccgttataaattggcttcatcccctccttgcctcatccatccaaatcccagtccccaatcccatcccttcgtaggagaaattcatcgaagctaagcgaatcctcgcgatcctctcaaggtactgcgagttttcgatccccctctcgacccctcgtatgtttgtgtttgtcgtagcgtttgattaggtatgctttccctgtttgtgttcgtcgtagcgtttgattaggtatgctttccctgttcgtgttcatcgtagtgtttgattaggtcgtgtgaggcgatggcctgctcgcgtccttcgatctgtagtcgatttgcgggtcgtggtgtagatctgcgggctgtgatgaagttatttggtgtgatctgctcgcctgattctgcgggttggctcgagtagatatgatggttggaccggttggttcgtttaccgcgctagggttgggctgggatgatgttgcatgcgccgttgcgcgtgatcccgcagcaggacttgcgtttgattgccagatctcgttacgattatgtgatttggtttggactttttagatctgtagcttctgcttatgtgccagatgcgcctactgctcatatgcctgatgataatcataaatggctgtggaactaactagttgattgcggagtcatgtatcagctacaggtgtagggactagctacaggtgtagggacttgcgtctaattgtttggtcctttactcatgttgcaattatgcaatttagtttagattgtttgttccactcatctaggctgtaaaagggacactgcttagattgctgtttaatctttttagtagattatattatattggtaacttattacccctattacatgccatacgtgacttctgctcatgcctgatgataatcatagatcactgtggaattaattagttgattgttgaatcatgtttcatgtacataccacggcacaattgcttagttccttaacaaatgcaaattttactgatccatgtatgatttgcgtggttctctaatgtgaaatactatagctacttgttagtaagaatcaggttcgtatgcttaatgctgtatgtgccttctgctcatgcctgatgataatcatatatcactggaattaattagttgatcgtttaatcatatatcaagtacataccatgccacaatttttagtcacttaacccatgcagattgaactggtccctgcatgttttgctaaattgttctattctgattagaccatatatcatgtatttttttttggtaatggttctcttattttaaatgctatatagttctggtacttgttagaaagatctgcttcatagtttagttgcctatccctcgaattaggatgctgagcagctgatcctatagctttgtttcatgtatcaattcttttgtgttcaacagtcagtttttgttagattcattgtaacttatggtcgcttactcttctggtcctcaatgcttgcagggatcccctaaatagaccatgccgaagaagaagcgcaaggtcgggggcgggggctcaggcgggggcgggagcggcggcgggggctctgggggcggcggcagcggcgggggcggcagcgggggcggcgggtcgatgctgttccaggatttcactcatctgtaccctctctcaaagactgttcggttcgagctcaagcctattgggcggactctggagcacatccacgcgaagaacttcctcagccaggacgaaaccatggccgacatgtaccagaaggtcaaggtcatcctcgacgactaccacagggacttcatcgcggacatgatgggcgaggtgaagctgacgaagctcgccgagttctacgacgtctacctcaagttccgcaagaacccgaaggacgacggcctccagaagcagctcaaggacctgcaggccgtcctgaggaaggagtccgtcaagcccatcggcagcggcggcaagtacaagaccggctacgacaggctgttcggcgccaagctgttcaaggacggcaaggagctcggcgacctggcgaagttcgtgatcgcgcaggagggcgagagctcccccaagctggcccacctggcccacttcgagaagttcagcacgtacttcaccggcttccacgacaacaggaagaacatgtacagcgacgaggacaagcacacggccatcgcctaccgcctcatccacgagaacctgccccgcttcatcgacaacctgcagatcctgacgaccatcaagcagaagcactccgccctgtacgaccagatcatcaacgagctcaccgcgagcggcctcgacgtgtccctcgccagccacctcgacggctaccacaagctcctgacccaggagggcatcaccgcctacaaccgcatcatcggcgaggtgaacggctacaccaacaagcacaaccagatctgccacaagtccgagaggatcgccaagctcaggcccctgcacaagcagatcctcagcgacggcatgggcgtgagcttcctcccgtccaagttcgccgacgactccgagatgtgccaggccgtgaacgagttctacaggcactacaccgacgtgttcgccaaggtgcagtccctgttcgacggcttcgacgaccaccagaaggacggcatctacgtggagcacaagaacctgaacgagctgtccaagcaggccttcggcgactgggccctcctgggccgcgtgctggacggctactacgtggacgtcgtgaacccggagttcaacgagcgcttcgcgaaggcgaagacggacaacgcgaaggccaagctcaccaaggagaaggacaagttcatcaagggcgtccacagcctcgcgtccctggagcaggcgatcgagcaccacaccgcgcgccacgacgacgagtccgtgcaggccggcaagctcggccagtacttcaagcacggcctggccggcgtcgacaacccgatccagaagatccacaacaaccactccaccatcaagggcttcctggagagggagcgcccggcgggcgagcgcgcgctccccaagatcaagtccggcaagaaccccgagatgacgcagctcaggcagctgaaggagctgctcgacaacgcgctcaacgtggcgcacttcgccaagctgctcacgaccaagaccacgctggacaaccaggacggcaacttctacggcgagttcggcgtcctgtacgacgagctggcgaagatcccgaccctgtacaacaaggtccgcgactacctgagccagaagcccttctccaccgagaagtacaagctcaacttcggcaacccgaccctcctgaacggctgggacctcaacaaggagaaggacaacttcggcgtgatcctccagaaggacggctgctactacctcgccctgctggacaaggcgcacaagaaggtcttcgacaacgccccgaacaccggcaagaacgtgtaccagaagatggtgtacaagctgctccccggccccaacaagatgctgccgaaggtgttcttcgcgaagtccaacctcgactactacaaccccagcgccgagctcctggacaagtacgccaagggcacgcacaagaagggcgacaacttcaacctcaaggactgccacgcgctgatcgacttcttcaaggcgggcatcaacaagcaccccgagtggcagcacttcggcttcaagttcagcccgacctccagctacagggacctcagcgacttctaccgcgaggtggagccccagggctaccaggtgaagttcgtcgacatcaacgccgactacatcgacgagctcgtcgagcagggcaagctctacctgttccagatctacaacaaggacttctccccgaaggcccacggcaagccgaacctccacacgctctacttcaaggccctcttcagcgaggacaacctggccgacccgatctacaagctcaacggcgaggcgcagatcttctaccgcaaggccagcctggacatgaacgaaacgaccatccacagggccggcgaggtcctggccaacaagaacccggacaacccgaagaagaggcagttcgtctacgacatcatcaaggacaagaggtacacccaggacaagttcatgctccacgtcccgatcaccatgaacttcggcgtccagggcatgaccatcaaggagttcaacaagaaggtcaaccagagcatccagcagtacgacgaggtgaacgtcatcggcatcgaccgcggcgagaggcacctgctctacctgacggtcatcaactccaagggcgagatcctcgagcagcgcagcctgaacaccatccagcagttcgactaccagaagaagctggacaacagggagaaggagagggtggccgcccgcaaggcctggggcgagatcgaaacgatcaaggagctcaagtccggctacctcagccacgtcgtgcaccagatcaaccagctcatgctgaagtacaacgcgatcgtggtcctcgaggacctgaacttcggcttcaagaggggccgcttcaaggtggagaagcagatctaccagaacttcgagaacgccctgatcaagaagctcaaccacctggtcctcaaggacaaggcggacgacgagatcggcagctacaagaacgcgctccagctgaccaacaacttcacggacctcaagtccatcggcaagcagacgggcttcctgttctacgtgccggcgtggaacacctccaagatcgacccggaaaccggcttcgtcgacctgctcaagccgcgctacgagaacatcgcgcagtcccaggcgttcttcggcaagttcgacaagatctgctacaacaccgacaagggctacttcgagttccacatcgactacgcgaagttcaccgacaaggccaagaactccaggcagaagtgggccatctgcagccacggcgacaagcgctacgtgtacgacaagacggcgaaccagaacaagggcgcggccaagggcatcaacgtgaacgacgagctgaagtccctcttcgcgcgctaccacatcaacgacaagcagccgaacctcgtcatggacatctgccagaacaacgacaaggagttccacaagagcctgatgtgcctgctcaagaccctgctccagatgaggaactcgaacgccgcgaccggcgaggactacatcctcagccccgtcgcgaacgacgagggcgtgttcttcaactccgccctcgcggacgacacgcagccgcagaacgccgacgcgaacggcgcctaccacatcgccctcaagggcctgtggctgctcaacgagctcaagaactccgacgacctgaacaaggtgaagctcgccattgacaaccagacgtggctgaatttcgctcagaatagggggggcgggggctcaggcgggggcgggagcggcggcgggggctctgggggcggcggcagcggcgggggcggcagcgggggcggcgggtcgccgaagaagaagcgcaaggtgtccggcggcagctccggcggcagcccgaagaagaagcgcaaagtgtgagggacccgatcgttcaaacatttggcaataaagtttcttaagattgaatcctgttgccggtcttgcgatgattatcatataatttctgttgaattacgttaagcatgtaataattaacatgtaatgcatgacgttatttatgagatgggtttttatgattagagtcccgcaattatacatttaatacgcgatagaaaacaaaatatagcgcgcaaactaggataaattatcgcgcgcggtgtcatctatgttactagatcggtaccgaattcattatgtggtctaggtaggttctatatataagaaaacttgaaatgttctaaaaaaaaattcaagcccatgcatgattgaagcaaacggtatagcaacggtgttaacctgatctagtgatctcttgcaatccttaacggccacctaccgcaggtagcaaacggcgtccccctcctcgatatctccgcggcgacctctggctttttccgcggaattgcgcggtggggacggattccacgagaccgcgacgcaaccgcctctcgccgctgggccccacaccgctcggtgccgtagcctcacgggactctttctccctcctcccccgttataaattggcttcatcccctccttgcctcatccatccaaatcccagtccccaatcccatcccttcgtaggagaaattcatcgaagctaagcgaatcctcgcgatcctctcaaggtactgcgagttttcgatccccctctcgacccctcgtatgtttgtgtttgtcgtagcgtttgattaggtatgctttccctgtttgtgttcgtcgtagcgtttgattaggtatgctttccctgttcgtgttcatcgtagtgtttgattaggtcgtgtgaggcgatggcctgctcgcgtccttcgatctgtagtcgatttgcgggtcgtggtgtagatctgcgggctgtgatgaagttatttggtgtgatctgctcgcctgattctgcgggttggctcgagtagatatgatggttggaccggttggttcgtttaccgcgctagggttgggctgggatgatgttgcatgcgccgttgcgcgtgatcccgcagcaggacttgcgtttgattgccagatctcgttacgattatgtgatttggtttggactttttagatctgtagcttctgcttatgtgccagatgcgcctactgctcatatgcctgatgataatcataaatggctgtggaactaactagttgattgcggagtcatgtatcagctacaggtgtagggactagctacaggtgtagggacttgcgtctaattgtttggtcctttactcatgttgcaattatgcaatttagtttagattgtttgttccactcatctaggctgtaaaagggacactgcttagattgctgtttaatctttttagtagattatattatattggtaacttattacccctattacatgccatacgtgacttctgctcatgcctgatgataatcatagatcactgtggaattaattagttgattgttgaatcatgtttcatgtacataccacggcacaattgcttagttccttaacaaatgcaaattttactgatccatgtatgatttgcgtggttctctaatgtgaaatactatagctacttgttagtaagaatcaggttcgtatgcttaatgctgtatgtgccttctgctcatgcctgatgataatcatatatcactggaattaattagttgatcgtttaatcatatatcaagtacataccatgccacaatttttagtcacttaacccatgcagattgaactggtccctgcatgttttgctaaattgttctattctgattagaccatatatcatgtatttttttttggtaatggttctcttattttaaatgctatatagttctggtacttgttagaaagatctgcttcatagtttagttgcctatccctcgaattaggatgctgagcagctgatcctatagctttgtttcatgtatcaattcttttgtgttcaacagtcagtttttgttagattcattgtaacttatggtcgcttactcttctggtcctcaatgcttgcagaagcttgaaattctgatgagtccgtgaggacgaaacgagtaagctcgtcaatttctactgtttgtagatgggaaagaccgaggagaagatctaatttctactgtttgtagatgcaccaaggaaggggaggagatcaatttctactgtttgtagatgtcacagatcacaaacttcaaatgaatttctactgtttgtagatacgcccagaaagcatacgcagtcggccggcatggtcccagcctcctcgctggcgccggctgggcaacatgcttcggcatggcgaatgggacgatcgttcaaacatttggcaataaagtttcttaagattgaatcctgttgccggtcttgcgatgattatcatataatttctgttgaattacgttaagcatgtaataattaacatgtaatgcatgacgttatttatgagatgggtttttatgattagagtcccgcaattatacatttaatacgcgatagaaaacaaaatatagcgcgcaaactaggataaattatcgcgcgcggtgtcatctatgttactagatccctaggctgcagtgcagcgtgacccggtcgtgcccctctctagagataatgagcattgcatgtctaagttataaaaaattaccacatattttttttgtcacacttgtttgaagtgcagtttatctatctttatacatatatttaaactttactctacgaataatataatctatagtactacaataatatcagtgttttagagaatcatataaatgaacagttagacatggtctaaaggacaattgagtattttgacaacaggactctacagttttatctttttagtgtgcatgtgttctcctttttttttgcaaatagcttcacctatataatacttcatccattttattagtacatccatttagggtttagggttaatggtttttatagactaatttttttagtacatctattttattctattttagcctctaaattaagaaaactaaaactctattttagtttttttatttaataatttagatataaaatagaataaaataaagtgactaaaaattaaacaaataccctttaagaaattaaaaaaactaaggaaacatttttcttgtttcgagtagataatgccagcctgttaaacgccgtcgacgagtctaacggacaccaaccagcgaaccagcagcgtcgcgtcgggccaagcgaagcagacggcacggcatctctgtcgctgcctctggacccctctcgagagttccgctccaccgttggacttgctccgctgtcggcatccagaaattgcgtggcggagcggcagacgtgagccggcacggcaggcggcctcctcctcctctcacggcaccggcagctacgggggattcctttcccaccgctccttcgctttcccttcctcgcccgccgtaataaatagacaccccctccacaccctctttccccaacctcgtgttgttcggagcgcacacacacacaaccagatctcccccaaatccacccgtcggcacctccgcttcaaggtacgccgctcgtcctccccccccccccctctctaccttctctagatcggcgttccggtccatggttagggcccggtagttctacttctgttcatgtttgtgttagatccgtgtttgtgttagatccgtgctgctagcgttcgtacacggatgcgacctgtacgtcagacacgttctgattgctaacttgccagtgtttctctttggggaatcctgggatggctctagccgttccgcagacgggatcgatttcatgattttttttgtttcgttgcatagggtttggtttgcccttttcctttatttcaatatatgccgtgcacttgtttgtcgggtcatcttttcatgcttttttttgtcttggttgtgatgatgtggtctggttgggcggtcgttctagatcggagtagaattctgtttcaaactacctggtggatttattaattttggatctgtatgtgtgtgccatacatattcatagttacgaattgaagatgatggatggaaatatcgatctaggataggtatacatgttgatgcgggttttactgatgcatatacagagatgctttttgttcgcttggttgtgatgatgtggtgtggttgggcggtcgttcattcgttctagatcggagtagaatactgtttcaaactacctggtgtatttattaattttggaactgtatgtgtgtgtcatacatcttcatagttacgagtttaagatggatggaaatatcgatctaggataggtatacatgttgatgtgggttttactgatgcatatacatgatggcatatgcagcatctattcatatgctctaaccttgagtacctatctattataataaacaagtatgttttataattattttgatcttgatatacttggatgatggcatatgcagcagctatatgtggatttttttagccctgccttcatacgctatttatttgcttggtactgtttcttttgtcgatgctcaccctgttgtttggtgttacttctgcagggatcaccgatcatgcaaaaactcattaactcagtgcaaaactatgcctggggcagcaaaacggcgttgactgaactttatggtatggaaaatccgtccagccagccgatggccgagctgtggatgggcgcacatccgaaaagcagttcacgagtgcagaatgccgccggagatatcgtttcactgcgtgatgtgattgagagtgataaatcgactctgctcggagaggccgttgccaaacgctttggcgaactgcctttcctgttcaaagtattatgcgcagcacagccactctccattcaggttcatccaaacaaacacaattctgaaatcggttttgccaaagaaaatgccgcaggtatcccgatggatgccgccgagcgtaactataaagatcctaaccacaagccggagctggtttttgcgctgacgcctttccttgcgatgaacgcgtttcgtgaattttccgagattgtctccctactccagccggtcgcaggtgcacatccggcgattgctcactttttacaacagcctgatgccgaacgtttaagcgaactgttcgccagcctgttgaatatgcagggtgaagaaaaatcccgcgcgctggcgattttaaaatcggccctcgatagccagcagggtgaaccgtggcaaacgattcgtttaatttctgaattttacccggaagacagcggtctgttctccccgctattgctgaatgtggtgaaattgaaccctggcgaagcgatgttcctgttcgctgaaacaccgcacgcttacctgcaaggcgtggcgctggaagtgatggcaaactccgataacgtgctgcgtgcgggtctgacgcctaaatacattgatattccggaactggttgccaatgtgaaattcgaagccaaaccggctaaccagttgttgacccagccggtgaaacaaggtgcagaactggacttcccgattccagtggatgattttgccttctcgctgcatgaccttagtgataaagaaaccaccattagccagcagagtgccgccattttgttctgcgtcgaaggcgatgcaacgttgtggaaaggttctcagcagttacagcttaaaccgggtgaatcagcgtttattgccgccaacgaatcaccggtgactgtcaaaggccacggccgtttagcgcgtgtttacaacaagctgtaagagcttactgaaaaaattaacatctcttgctaagctgggagctcgatccgtcgacctgcagatcgttcaaacatttggcaataaagtttcttaagattgaatcctgttgccggtcttgcgatgattatcatataatttctgttgaattacgttaagcatgtaataattaacatgtaatgcatgacgttatttatgagatgggtttttatgattagagtcccgcaattatacatttaatacgcgatagaaaacaaaatatagcgcgcaaactaggataaattatcgcgcgcggtgtcatctatgttactagatccggaccgcctgcaggcccgggggcgcgccctaattagctaacggccaggatcgccgcgtgagcctttagcaactagctagattaattaacgcaatctgttattaagttgtctaagcgtcaatttgtttacaccacaatatatcctgccaccagccagccaacagctccccgaccggcagctcggcacaaaatcaccactcgatacaggcagcccatcagaattaattctcatgtttgacagcttatcatcgactgcacggtgcaccaatgcttctggcgtcaggcagccatcggaagctgtggtatggctgtgcaggtcgtaaatcactgcataattcgtgtcgctcaaggcgcactcccgttctggataatgttttttgcgccgacatcataacggttctggcaaatattctgaaatgagctgttgacaattaatcatccggctcgtataatgtgtggaattgtgagcggataacaatttcacacaggaaacagaccatgagggaagcgttgatcgccgaagtatcgactcaactatcagaggtagttggcgtcatcgagcgccatctcgaaccgacgttgctggccgtacatttgtacggctccgcagtggatggcggcctgaagccacacagtgatattgatttgctggttacggtgaccgtaaggcttgatgaaacaacgcggcgagctttgatcaacgaccttttggaaacttcggcttcccctggagagagcgagattctccgcgctgtagaagtcaccattgttgtgcacgacgacatcattccgtggcgttatccagctaagcgcgaactgcaatttggagaatggcagcgcaatgacattcttgcaggtatcttcgagccagccacgatcgacattgatctggctatcttgctgacaaaagcaagagaacatagcgttgccttggtaggtccagcggcggaggaactctttgatccggttcctgaacaggatctatttgaggcgctaaatgaaaccttaacgctatggaactcgccgcccgactgggctggcgatgagcgaaatgtagtgcttacgttgtcccgcatttggtacagcgcagtaaccggcaaaatcgcgccgaaggatgtcgctgccgactgggcaatggagcgcctgccggcccagtatcagcccgtcatacttgaagctaggcaggcttatcttggacaagaagatcgcttggcctcgcgcgcagatcagttggaagaatttgttcactacgtgaaaggcgagatcaccaaagtagtcggcaaataaagctctagtggatctccgtacccagggatctggctcgcggcggacgcacgacgccggggcgagaccataggcgatctcctaaatcaatagtagctgtaacctcgaagcgtttcacttgtaacaacgattgagaatttttgtcataaaattgaaatacttggttcgcatttttgtcatccgcggtcagccgcaattctgacgaactgcccatttagctggagatgattgtacatccttcacgtgaaaatttctcaagcgctgtgaacaagggttcagattttagattgaaaggtgagccgttgaaacacgttcttcttgtcgatgacgacgtcgctatgcggcatcttattattgaataccttacgatccacgccttcaaagtgaccgcggtagccgacagcacccagttcacaagagtactctcttccgcgacggtcgatgtcgtggttgttgatctagatttaggtcgtgaagatgggctcgagatcgttcgtaatctggcggcaaagtctgatattccaatcataattatcagtggcgaccgccttgaggagacggataaagttgttgcactcgagctaggagcaagtgattttatcgctaagccgttcagtatcagagagtttctagcacgcattcgggttgccttgcgcgtgcgccccaacgttgtccgctccaaagaccgacggtctttttgttttactgactggacacttaatctcaggcaacgtcgcttgatgtccgaagctggcggtgaggtgaaacttacggcaggtgagttcaatcttctcctcgcgtttttagagaaaccccgcgacgttctatcgcgcgagcaacttctcattgccagtcgagtacgcgacgaggaggtttatgacaggagtatagatgttctcattttgaggctgcgccgcaaacttgaggcagatccgtcaagccctcaactgataaaaacagcaagaggtgccggttatttctttgacgcggacgtgcaggtttcgcacggggggacgatggcagcctgagccaattcccagatccccgaggaatcggcgtgagcggtcgcaaaccatccggcccggtacaaatcggcgcggcgctgggtgatgacctggtggagaagttgaaggccgcgcaggccgcccagcggcaacgcatcgaggcagaagcacgccccggtgaatcgtggcaagcggccgctgatcgaatccgcaaagaatcccggcaaccgccggcagccggtgcgccgtcgattaggaagccgcccaagggcgacgagcaaccagattttttcgttccgatgctctatgacgtgggcacccgcgatagtcgcagcatcatggacgtggccgttttccgtctgtcgaagcgtgaccgacgagctggcgaggtgatccgctacgagcttccagacgggcacgtagaggtttccgcagggccggccggcatggccagtgtgtgggattacgacctggtactgatggcggtttcccatctaaccgaatccatgaaccgataccgggaagggaagggagacaagcccggccgcgtgttccgtccacacgttgcggacgtactcaagttctgccggcgagccgatggcggaaagcagaaagacgacctggtagaaacctgcattcggttaaacaccacgcacgttgccatgcagcgtacgaagaaggccaagaacggccgcctggtgacggtatccgagggtgaagccttgattagccgctacaagatcgtaaagagcgaaaccgggcggccggagtacatcgagatcgagctggctgattggatgtaccgcgagatcacagaaggcaagaacccggacgtgctgacggttcaccccgattactttttgatcgatcccggcatcggccgttttctctaccgcctggcacgccgcgccgcaggcaaggcagaagccagatggttgttcaagacgatctacgaacgcagtggcagcgccggagagttcaagaagttctgtttcaccgtgcgcaagctgatcgggtcaaatgacctgccggagtacgatttgaaggaggaggcggggcaggctggcccgatcctagtcatgcgctaccgcaacctgatcgagggcgaagcatccgccggttcctaatgtacggagcagatgctagggcaaattgccctagcaggggaaaaaggtcgaaaaggtctctttcctgtggatagcacgtacattgggaacccaaagccgtacattgggaaccggaacccgtacattgggaacccaaagccgtacattgggaaccggtcacacatgtaagtgactgatataaaagagaaaaaaggcgatttttccgcctaaaactctttaaaacttattaaaactcttaaaacccgcctggcctgtgcataactgtctggccagcgcacagccgaagagctgcaaaaagcgcctacccttcggtcgctgcgctccctacgccccgccgcttcgcgtcggcctatcgcggccgctggccgctcaaaaatggctggcctacggccaggcaatctaccagggcgcggacaagccgcgccgtcgccactcgaccgccggcgctgaggtctgcctcgtgaagaaggtgttgctgactcataccaggcctgaatcgccccatcatccagccagaaagtgagggagccacggttgatgagagctttgttgtaggtggaccagttggtgattttgaacttttgctttgccacggaacggtctgcgttgtcgggaagatgcgtgatctgatccttcaactcagcaaaagttcgatttattcaacaaagccgccgtcccgtcaagtcagcgtaatgctctgccagtgttacaaccaattaaccaattctgattagaaaaactcatcgagcatcaaatgaaactgcaatttattcatatcaggattatcaataccatatttttgaaaaagccgtttctgtaatgaaggagaaaactcaccgaggcagttccataggatggcaagatcctggtatcggtctgcgattccgactcgtccaacatcaatacaacctattaatttcccctcgtcaaaaataaggttatcaagtgagaaatcaccatgagtgacgactgaatccggtgagaatggcaaaagctctgcattaatgaatcggccaacgcgcggggagaggcggtttgcgtattgggcgctcttccgcttcctcgctcactgactcgctgcgctcggtcgttcggctgcggcgagcggtatcagctcactcaaaggcggtaatacggttatccacagaatcaggggataacgcaggaaagaacatgtgagcaaaaggccagcaaaaggccaggaaccgtaaaaaggccgcgttgctggcgtttttccataggctccgcccccctgacgagcatcacaaaaatcgacgctcaagtcagaggtggcgaaacccgacaggactataaagataccaggcgtttccccctggaagctccctcgtgcgctctcctgttccgaccctgccgcttaccggatacctgtccgcctttctcccttcgggaagcgtggcgctttctcatagctcacgctgtaggtatctcagttcggtgtaggtcgttcgctccaagctgggctgtgtgcacgaaccccccgttcagcccgaccgctgcgccttatccggtaactatcgtcttgagtccaacccggtaagacacgacttatcgccactggcagcagccactggtaacaggattagcagagcgaggtatgtaggcggtgctacagagttcttgaagtggtggcctaactacggctacactagaagaacagtatttggtatctgcgctctgctgaagccagttaccttcggaaaaagagttggtagctcttgatccggcaaacaaaccaccgctggtagcggtggtttttttgtttgcaagcagcagattacgcgcagaaaaaaaggatctcaagaagatcctttgatcttttctacggggtctgacgctcagtggaacgaaaactcacgttaagggattttggtcatgagattatcaaaaaggatcttcacctagatccttttgatccggaatta

SEQ ID NO: 114 - DNA, 17504 bp, synthetic construct
  source 1..17504: mol_type = other DNA
attcctgtggttggcatgcacatacaaatggacgaacggataaaccttttcacgcccttttaaatatccgattattctaataaacgctcttttctcttaggtttacccgccaatatatcctgtcaaacactgatagtttaaactggcactagcctaacggtgttgactaactaggccgcttccctaattagctaacccgggggcgcgccgggaccggaattcattatgtggtctaggtaggttctatatataagaaaacttgaaatgttctaaaaaaaaattcaagcccatgcatgattgaagcaaacggtatagcaacggtgttaacctgatctagtgatctcttgcaatccttaacggccacctaccgcaggtagcaaacggcgtccccctcctcgatatctccgcggcgacctctggctttttccgcggaattgcgcggtggggacggattccacgagaccgcgacgcaaccgcctctcgccgctgggccccacaccgctcggtgccgtagcctcacgggactctttctccctcctcccccgttataaattggcttcatcccctccttgcctcatccatccaaatcccagtccccaatcccatcccttcgtaggagaaattcatcgaagctaagcgaatcctcgcgatcctctcaaggtactgcgagttttcgatccccctctcgacccctcgtatgtttgtgtttgtcgtagcgtttgattaggtatgctttccctgtttgtgttcgtcgtagcgtttgattaggtatgctttccctgttcgtgttcatcgtagtgtttgattaggtcgtgtgaggcgatggcctgctcgcgtccttcgatctgtagtcgatttgcgggtcgtggtgtagatctgcgggctgtgatgaagttatttggtgtgatctgctcgcctgattctgcgggttggctcgagtagatatgatggttggaccggttggttcgtttaccgcgctagggttgggctgggatgatgttgcatgcgccgttgcgcgtgatcccgcagcaggacttgcgtttgattgccagatctcgttacgattatgtgatttggtttggactttttagatctgtagcttctgcttatgtgccagatgcgcctactgctcatatgcctgatgataatcataaatggctgtggaactaactagttgattgcggagtcatgtatcagctacaggtgtagggactagctacaggtgtagggacttgcgtctaattgtttggtcctttactcatgttgcaattatgcaatttagtttagattgtttgttccactcatctaggctgtaaaagggacactgcttagattgctgtttaatctttttagtagattatattatattggtaacttattacccctattacatgccatacgtgacttctgctcatgcctgatgataatcatagatcactgtggaattaattagttgattgttgaatcatgtttcatgtacataccacggcacaattgcttagttccttaacaaatgcaaattttactgatccatgtatgatttgcgtggttctctaatgtgaaatactatagctacttgttagtaagaatcaggttcgtatgcttaatgctgtatgtgccttctgctcatgcctgatgataatcatatatcactggaattaattagttgatcgtttaatcatatatcaagtacataccatgccacaatttttagtcacttaacccatgcagattgaactggtccctgcatgttttgctaaattgttctattctgattagaccatatatcatgtatttttttttggtaatggttctcttattttaaatgctatatagttctggtacttgttagaaagatctgcttcatagtttagttgcctatccctcgaattaggatgctgagcagctgatcctatagctttgtttcatgtatcaattcttttgtgttcaacagtcagtttttgttagattcattgtaacttatggtcgcttactcttctggtcctcaatgcttgcagggatcccctaaatagaccatgccgaagaagaagcgcaaggtcgggggcgggggctcaggcgggggcgggagcggcggcgggggctctgggggcggcggcagcggcgggggcggcagcgggggcggcgggtcgatgctgttccaggatttcactcatctgtaccctctctcaaagactgttcggttcgagctcaagcctattgggcggactctggagcacatccacgcgaagaacttcctcagccaggacgaaaccatggccgacatgtaccagaaggtcaaggtcatcctcgacgactaccacagggacttcatcgcggacatgatgggcgaggtgaagctgacgaagctcgccgagttctacgacgtctacctcaagttccgcaagaacccgaaggacgacggcctccagaagcagctcaaggacctgcaggccgtcctgaggaaggagtccgtcaagcccatcggcagcggcggcaagtacaagaccggctacgacaggctgttcggcgccaagctgttcaaggacggcaaggagctcggcgacctggcgaagttcgtgatcgcgcaggagggcgagagctcccccaagctggcccacctggcccacttcgagaagttcagcacgtacttcaccggcttccacaggaacaggaagaacatgtacagcgacgaggacaagcacacggccatcgcctaccgcctcatccacgagaacctgccccgcttcatcgacaacctgcagatcctgacgaccatcaagcagaagcactccgccctgtacgaccagatcatcaacgagctcaccgcgagcggcctcgacgtgtccctcgccagccacctcgacggctaccacaagctcctgacccaggagggcatcaccgcctacaaccgcatcatcggcgaggtgaacggctacaccaacaagcacaaccagatctgccacaagtccgagaggatcgccaagctcaggcccctgcacaagcagatcctcagcgacggcatgggcgtgagcttcctcccgtccaagttcgccgacgactccgagatgtgccaggccgtgaacgagttctacaggcactacaccgacgtgttcgccaaggtgcagtccctgttcgacggcttcgacgaccaccagaaggacggcatctacgtggagcacaagaacctgaacgagctgtccaagcaggccttcggcgactgggccctcctgggccgcgtgctggacggctactacgtggacgtcgtgaacccggagttcaacgagcgcttcgcgaaggcgaagacggacaacgcgaaggccaagctcaccaaggagaaggacaagttcatcaagggcgtccacagcctcgcgtccctggagcaggcgatcgagcaccacaccgcgcgccacgacgacgagtccgtgcaggccggcaagctcggccagtacttcaagcacggcctggccggcgtcgacaacccgatccagaagatccacaacaaccactccaccatcaagggcttcctggagagggagcgcccggcgggcgagcgcgcgctccccaagatcaagtccggcaagaaccccgagatgacgcagctcaggcagctgaaggagctgctcgacaacgcgctcaacgtggcgcacttcgccaagctgctcacgaccaagaccacgctggacaaccaggacggcaacttctacggcgagttcggcgtcctgtacgacgagctggcgaagatcccgaccctgtacaacaaggtccgcgactacctgagccagaagcccttctccaccgagaagtacaagctcaacttcggcaacccgaccctcctgaacggctgggacctcaacaaggagaaggacaacttcggcgtgatcctccagaaggacggctgctactacctcgccctgctggacaaggcgcacaagaaggtcttcgacaacgccccgaacaccggcaagaacgtgtaccagaagatggtgtacaagctgctccccggccccaacaagatgctgccgaaggtgttcttcgcgaagtccaacctcgactactacaaccccagcgccgagctcctggacaagtacgccaagggcacgcacaagaagggcgacaacttcaacctcaaggactgccacgcgctgatcgacttcttcaaggcgggcatcaacaagcaccccgagtggcagcacttcggcttcaagttcagcccgacctccagctacagggacctcagcgacttctaccgcgaggtggagccccagggctaccaggtgaagttcgtcgacatcaacgccgactacatcgacgagctcgtcgagcagggcaagctctacctgttccagatctacaacaaggacttctccccgaaggcccacggcaagccgaacctccacacgctctacttcaaggccctcttcagcgaggacaacctggccgacccgatctacaagctcaacggcgaggcgcagatcttctaccgcaaggccagcctggacatgaacgaaacgaccatccacagggccggcgaggtcctggccaacaagaacccggacaacccgaagaagaggcagttcgtctacgacatcatcaaggacaagaggtacacccaggacaagttcatgctccacgtcccgatcaccatgaacttcggcgtccagggcatgaccatcaaggagttcaacaagaaggtcaaccagagcatccagcagtacgacgaggtgaacgtcatcggcatcgaccgcggcgagaggcacctgctctacctgacggtcatcaactccaagggcgagatcctcgagcagcgcagcctgaacaccatccagcagttcgactaccagaagaagctggacaacagggagaaggagagggtggccgcccgcaaggcctggggcgagatcgaaacgatcaaggagctcaagtccggctacctcagccacgtcgtgcaccagatcaaccagctcatgctgaagtacaacgcgatcgtggtcctcgaggacctgaacttcggcttcaagaggggccgcttcaaggtggagaagcagatctaccagaacttcgagaacgccctgatcaagaagctcaaccacctggtcctcaaggacaaggcggacgacgagatcggcagctacaagaacgcgctccagctgaccaacaacttcacggacctcaagtccatcggcaagcagacgggcttcctgttctacgtgccggcgtggaacacctccaagatcgacccggaaaccggcttcgtcgacctgctcaagccgcgctacgagaacatcgcgcagtcccaggcgttcttcggcaagttcgacaagatctgctacaacaccgacaagggctacttcgagttccacatcgactacgcgaagttcaccgacaaggccaagaactccaggcagaagtgggccatctgcagccacggcgacaagcgctacgtgtacgacaagacggcgaaccagaacaagggcgcggccaagggcatcaacgtgaacgacgagctgaagtccctcttcgcgcgctaccacatcaacgacaagcagccgaacctcgtcatggacatctgccagaacaacgacaaggagttccacaagagcctgatgtgcctgctcaagaccctgctccagatgaggaactcgaacgccgcgaccggcgaggactacatcctcagccccgtcgcgaacgacgagggcgtgttcttcaactccgccctcgcggacgacacgcagccgcagaacgccgacgcgaacggcgcctaccacatcgccctcaagggcctgtggctgctcaacgagctcaagaactccgacgacctgaacaaggtgaagctcgccattgacaaccagacgtggctgaatttcgctcagaatagggggggcgggggctcaggcgggggcgggagcggcggcgggggctctgggggcggcggcagcggcgggggcggcagcgggggcggcgggtcgccgaagaagaagcgcaaggtgtccggcggcagctccggcggcagcccgaagaagaagcgcaaagtgtgagggacccgatcgttcaaacatttggcaataaagtttcttaagattgaatcctgttgccggtcttgcgatgattatcatataatttctgttgaattacgttaagcatgtaataattaacatgtaatgcatgacgttatttatgagatgggtttttatgattagagtcccgcaattatacatttaatacgcgatagaaaacaaaatatagcgcgcaaactaggataaattatcgcgcgcggtgtcatctatgttactagatcggtaccgaattcattatgtggtctaggtaggttctatatataagaaaacttgaaatgttctaaaaaaaaattcaagcccatgcatgattgaagcaaacggtatagcaacggtgttaacctgatctagtgatctcttgcaatccttaacggccacctaccgcaggtagcaaacggcgtccccctcctcgatatctccgcggcgacctctggctttttccgcggaattgcgcggtggggacggattccacgagaccgcgacgcaaccgcctctcgccgctgggccccacaccgctcggtgccgtagcctcacgggactctttctccctcctcccccgttataaattggcttcatcccctccttgcctcatccatccaaatcccagtccccaatcccatcccttcgtaggagaaattcatcgaagctaagcgaatcctcgcgatcctctcaaggtactgcgagttttcgatccccctctcgacccctcgtatgtttgtgtttgtcgtagcgtttgattaggtatgctttccctgtttgtgttcgtcgtagcgtttgattaggtatgctttccctgttcgtgttcatcgtagtgtttgattaggtcgtgtgaggcgatggcctgctcgcgtccttcgatctgtagtcgatttgcgggtcgtggtgtagatctgcgggctgtgatgaagttatttggtgtgatctgctcgcctgattctgcgggttggctcgagtagatatgatggttggaccggttggttcgtttaccgcgctagggttgggctgggatgatgttgcatgcgccgttgcgcgtgatcccgcagcaggacttgcgtttgattgccagatctcgttacgattatgtgatttggtttggactttttagatctgtagcttctgcttatgtgccagatgcgcctactgctcatatgcctgatgataatcataaatggctgtggaactaactagttgattgcggagtcatgtatcagctacaggtgtagggactagctacaggtgtagggacttgcgtctaattgtttggtcctttactcatgttgcaattatgcaatttagtttagattgtttgttccactcatctaggctgtaaaagggacactgcttagattgctgtttaatctttttagtagattatattatattggtaacttattacccctattacatgccatacgtgacttctgctcatgcctgatgataatcatagatcactgtggaattaattagttgattgttgaatcatgtttcatgtacataccacggcacaattgcttagttccttaacaaatgcaaattttactgatccatgtatgatttgcgtggttctctaatgtgaaatactatagctacttgttagtaagaatcaggttcgtatgcttaatgctgtatgtgccttctgctcatgcctgatgataatcatatatcactggaattaattagttgatcgtttaatcatatatcaagtacataccatgccacaatttttagtcacttaacccatgcagattgaactggtccctgcatgttttgctaaattgttctattctgattagaccatatatcatgtatttttttttggtaatggttctcttattttaaatgctatatagttctggtacttgttagaaagatctgcttcatagtttagttgcctatccctcgaattaggatgctgagcagctgatcctatagctttgtttcatgtatcaattcttttgtgttcaacagtcagtttttgttagattcattgtaacttatggtcgcttactcttctggtcctcaatgcttgcagaagcttgaaattctgatgagtccgtgaggacgaaacgagtaagctcgtcaatttctactgtttgtagatgggaaagaccgaggagaagatctaatttctactgtttgtagatgcaccaaggaaggggaggagatcaatttctactgtttgtagatgtcacagatcacaaacttcaaatgaatttctactgtttgtagatacgcccagaaagcatacgcagtcggccggcatggtcccagcctcctcgctggcgccggctgggcaacatgcttcggcatggcgaatgggacgatcgttcaaacatttggcaataaagtttcttaagattgaatcctgttgccggtcttgcgatgattatcatataatttctgttgaattacgttaagcatgtaataattaacatgtaatgcatgacgttatttatgagatgggtttttatgattagagtcccgcaattatacatttaatacgcgatagaaaacaaaatatagcgcgcaaactaggataaattatcgcgcgcggtgtcatctatgttactagatccctaggctgcagtgcagcgtgacccggtcgtgcccctctctagagataatgagcattgcatgtctaagttataaaaaattaccacatattttttttgtcacacttgtttgaagtgcagtttatctatctttatacatatatttaaactttactctacgaataatataatctatagtactacaataatatcagtgttttagagaatcatataaatgaacagttagacatggtctaaaggacaattgagtattttgacaacaggactctacagttttatctttttagtgtgcatgtgttctcctttttttttgcaaatagcttcacctatataatacttcatccattttattagtacatccatttagggtttagggttaatggtttttatagactaatttttttagtacatctattttattctattttagcctctaaattaagaaaactaaaactctattttagtttttttatttaataatttagatataaaatagaataaaataaagtgactaaaaattaaacaaataccctttaagaaattaaaaaaactaaggaaacatttttcttgtttcgagtagataatgccagcctgttaaacgccgtcgacgagtctaacggacaccaaccagcgaaccagcagcgtcgcgtcgggccaagcgaagcagacggcacggcatctctgtcgctgcctctggacccctctcgagagttccgctccaccgttggacttgctccgctgtcggcatccagaaattgcgtggcggagcggcagacgtgagccggcacggcaggcggcctcctcctcctctcacggcaccggcagctacgggggattcctttcccaccgctccttcgctttcccttcctcgcccgccgtaataaatagacaccccctccacaccctctttccccaacctcgtgttgttcggagcgcacacacacacaaccagatctcccccaaatccacccgtcggcacctccgcttcaaggtacgccgctcgtcctccccccccccccctctctaccttctctagatcggcgttccggtccatggttagggcccggtagttctacttctgttcatgtttgtgttagatccgtgtttgtgttagatccgtgctgctagcgttcgtacacggatgcgacctgtacgtcagacacgttctgattgctaacttgccagtgtttctctttggggaatcctgggatggctctagccgttccgcagacgggatcgatttcatgattttttttgtttcgttgcatagggtttggtttgcccttttcctttatttcaatatatgccgtgcacttgtttgtcgggtcatcttttcatgcttttttttgtcttggttgtgatgatgtggtctggttgggcggtcgttctagatcggagtagaattctgtttcaaactacctggtggatttattaattttggatctgtatgtgtgtgccatacatattcatagttacgaattgaagatgatggatggaaatatcgatctaggataggtatacatgttgatgcgggttttactgatgcatatacagagatgctttttgttcgcttggttgtgatgatgtggtgtggttgggcggtcgttcattcgttctagatcggagtagaatactgtttcaaactacctggtgtatttattaattttggaactgtatgtgtgtgtcatacatcttcatagttacgagtttaagatggatggaaatatcgatctaggataggtatacatgttgatgtgggttttactgatgcatatacatgatggcatatgcagcatctattcatatgctctaaccttgagtacctatctattataataaacaagtatgttttataattattttgatcttgatatacttggatgatggcatatgcagcagctatatgtggatttttttagccctgccttcatacgctatttatttgcttggtactgtttcttttgtcgatgctcaccctgttgtttggtgttacttctgcagggatcaccgatcatgcaaaaactcattaactcagtgcaaaactatgcctggggcagcaaaacggcgttgactgaactttatggtatggaaaatccgtccagccagccgatggccgagctgtggatgggcgcacatccgaaaagcagttcacgagtgcagaatgccgccggagatatcgtttcactgcgtgatgtgattgagagtgataaatcgactctgctcggagaggccgttgccaaacgctttggcgaactgcctttcctgttcaaagtattatgcgcagcacagccactctccattcaggttcatccaaacaaacacaattctgaaatcggttttgccaaagaaaatgccgcaggtatcccgatggatgccgccgagcgtaactataaagatcctaaccacaagccggagctggtttttgcgctgacgcctttccttgcgatgaacgcgtttcgtgaattttccgagattgtctccctactccagccggtcgcaggtgcacatccggcgattgctcactttttacaacagcctgatgccgaacgtttaagcgaactgttcgccagcctgttgaatatgcagggtgaagaaaaatcccgcgcgctggcgattttaaaatcggccctcgatagccagcagggtgaaccgtggcaaacgattcgtttaatttctgaattttacccggaagacagcggtctgttctccccgctattgctgaatgtggtgaaattgaaccctggcgaagcgatgttcctgttcgctgaaacaccgcacgcttacctgcaaggcgtggcgctggaagtgatggcaaactccgataacgtgctgcgtgcgggtctgacgcctaaatacattgatattccggaactggttgccaatgtgaaattcgaagccaaaccggctaaccagttgttgacccagccggtgaaacaaggtgcagaactggacttcccgattccagtggatgattttgccttctcgctgcatgaccttagtgataaagaaaccaccattagccagcagagtgccgccattttgttctgcgtcgaaggcgatgcaacgttgtggaaaggttctcagcagttacagcttaaaccgggtgaatcagcgtttattgccgccaacgaatcaccggtgactgtcaaaggccacggccgtttagcgcgtgtttacaacaagctgtaagagcttactgaaaaaattaacatctcttgctaagctgggagctcgatccgtcgacctgcagatcgttcaaacatttggcaataaagtttcttaagattgaatcctgttgccggtcttgcgatgattatcatataatttctgttgaattacgttaagcatgtaataattaacatgtaatgcatgacgttatttatgagatgggtttttatgattagagtcccgcaattatacatttaatacgcgatagaaaacaaaatatagcgcgcaaactaggataaattatcgcgcgcggtgtcatctatgttactagatccggaccgcctgcaggcccgggggcgcgccctaattagctaacggccaggatcgccgcgtgagcctttagcaactagctagattaattaacgcaatctgttattaagttgtctaagcgtcaatttgtttacaccacaatatatcctgccaccagccagccaacagctccccgaccggcagctcggcacaaaatcaccactcgatacaggcagcccatcagaattaattctcatgtttgacagcttatcatcgactgcacggtgcaccaatgcttctggcgtcaggcagccatcggaagctgtggtatggctgtgcaggtcgtaaatcactgcataattcgtgtcgctcaaggcgcactcccgttctggataatgttttttgcgccgacatcataacggttctggcaaatattctgaaatgagctgttgacaattaatcatccggctcgtataatgtgtggaattgtgagcggataacaatttcacacaggaaacagaccatgagggaagcgttgatcgccgaagtatcgactcaactatcagaggtagttggcgtcatcgagcgccatctcgaaccgacgttgctggccgtacatttgtacggctccgcagtggatggcggcctgaagccacacagtgatattgatttgctggttacggtgaccgtaaggcttgatgaaacaacgcggcgagctttgatcaacgaccttttggaaacttcggcttcccctggagagagcgagattctccgcgctgtagaagtcaccattgttgtgcacgacgacatcattccgtggcgttatccagctaagcgcgaactgcaatttggagaatggcagcgcaatgacattcttgcaggtatcttcgagccagccacgatcgacattgatctggctatcttgctgacaaaagcaagagaacatagcgttgccttggtaggtccagcggcggaggaactctttgatccggttcctgaacaggatctatttgaggcgctaaatgaaaccttaacgctatggaactcgccgcccgactgggctggcgatgagcgaaatgtagtgcttacgttgtcccgcatttggtacagcgcagtaaccggcaaaatcgcgccgaaggatgtcgctgccgactgggcaatggagcgcctgccggcccagtatcagcccgtcatacttgaagctaggcaggcttatcttggacaagaagatcgcttggcctcgcgcgcagatcagttggaagaatttgttcactacgtgaaaggcgagatcaccaaagtagtcggcaaataaagctctagtggatctccgtacccagggatctggctcgcggcggacgcacgacgccggggcgagaccataggcgatctcctaaatcaatagtagctgtaacctcgaagcgtttcacttgtaacaacgattgagaatttttgtcataaaattgaaatacttggttcgcatttttgtcatccgcggtcagccgcaattctgacgaactgcccatttagctggagatgattgtacatccttcacgtgaaaatttctcaagcgctgtgaacaagggttcagattttagattgaaaggtgagccgttgaaacacgttcttcttgtcgatgacgacgtcgctatgcggcatcttattattgaataccttacgatccacgccttcaaagtgaccgcggtagccgacagcacccagttcacaagagtactctcttccgcgacggtcgatgtcgtggttgttgatctagatttaggtcgtgaagatgggctcgagatcgttcgtaatctggcggcaaagtctgatattccaatcataattatcagtggcgaccgccttgaggagacggataaagttgttgcactcgagctaggagcaagtgattttatcgctaagccgttcagtatcagagagtttctagcacgcattcgggttgccttgcgcgtgcgccccaacgttgtccgctccaaagaccgacggtctttttgttttactgactggacacttaatctcaggcaacgtcgcttgatgtccgaagctggcggtgaggtgaaacttacggcaggtgagttcaatcttctcctcgcgtttttagagaaaccccgcgacgttctatcgcgcgagcaacttctcattgccagtcgagtacgcgacgaggaggtttatgacaggagtatagatgttctcattttgaggctgcgccgcaaacttgaggcagatccgtcaagccctcaactgataaaaacagcaagaggtgccggttatttctttgacgcggacgtgcaggtttcgcacggggggacgatggcagcctgagccaattcccagatccccgaggaatcggcgtgagcggtcgcaaaccatccggcccggtacaaatcggcgcggcgctgggtgatgacctggtggagaagttgaaggccgcgcaggccgcccagcggcaacgcatcgaggcagaagcacgccccggtgaatcgtggcaagcggccgctgatcgaatccgcaaagaatcccggcaaccgccggcagccggtgcgccgtcgattaggaagccgcccaagggcgacgagcaaccagattttttcgttccgatgctctatgacgtgggcacccgcgatagtcgcagcatcatggacgtggccgttttccgtctgtcgaagcgtgaccgacgagctggcgaggtgatccgctacgagcttccagacgggcacgtagaggtttccgcagggccggccggcatggccagtgtgtgggattacgacctggtactgatggcggtttcccatctaaccgaatccatgaaccgataccgggaagggaagggagacaagcccggccgcgtgttccgtccacacgttgcggacgtactcaagttctgccggcgagccgatggcggaaagcagaaagacgacctggtagaaacctgcattcggttaaacaccacgcacgttgccatgcagcgtacgaagaaggccaagaacggccgcctggtgacggtatccgagggtgaagccttgattagccgctacaagatcgtaaagagcgaaaccgggcggccggagtacatcgagatcgagctggctgattggatgtaccgcgagatcacagaaggcaagaacccggacgtgctgacggttcaccccgattactttttgatcgatcccggcatcggccgttttctctaccgcctggcacgccgcgccgcaggcaaggcagaagccagatggttgttcaagacgatctacgaacgcagtggcagcgccggagagttcaagaagttctgtttcaccgtgcgcaagctgatcgggtcaaatgacctgccggagtacgatttgaaggaggaggcggggcaggctggcccgatcctagtcatgcgctaccgcaacctgatcgagggcgaagcatccgccggttcctaatgtacggagcagatgctagggcaaattgccctagcaggggaaaaaggtcgaaaaggtctctttcctgtggatagcacgtacattgggaacccaaagccgtacattgggaaccggaacccgtacattgggaacccaaagccgtacattgggaaccggtcacacatgtaagtgactgatataaaagagaaaaaaggcgatttttccgcctaaaactctttaaaacttattaaaactcttaaaacccgcctggcctgtgcataactgtctggccagcgcacagccgaagagctgcaaaaagcgcctacccttcggtcgctgcgctccctacgccccgccgcttcgcgtcggcctatcgcggccgctggccgctcaaaaatggctggcctacggccaggcaatctaccagggcgcggacaagccgcgccgtcgccactcgaccgccggcgctgaggtctgcctcgtgaagaaggtgttgctgactcataccaggcctgaatcgccccatcatccagccagaaagtgagggagccacggttgatgagagctttgttgtaggtggaccagttggtgattttgaacttttgctttgccacggaacggtctgcgttgtcgggaagatgcgtgatctgatccttcaactcagcaaaagttcgatttattcaacaaagccgccgtcccgtcaagtcagcgtaatgctctgccagtgttacaaccaattaaccaattctgattagaaaaactcatcgagcatcaaatgaaactgcaatttattcatatcaggattatcaataccatatttttgaaaaagccgtttctgtaatgaaggagaaaactcaccgaggcagttccataggatggcaagatcctggtatcggtctgcgattccgactcgtccaacatcaatacaacctattaatttcccctcgtcaaaaataaggttatcaagtgagaaatcaccatgagtgacgactgaatccggtgagaatggcaaaagctctgcattaatgaatcggccaacgcgcggggagaggcggtttgcgtattgggcgctcttccgcttcctcgctcactgactcgctgcgctcggtcgttcggctgcggcgagcggtatcagctcactcaaaggcggtaatacggttatccacagaatcaggggataacgcaggaaagaacatgtgagcaaaaggccagcaaaaggccaggaaccgtaaaaaggccgcgttgctggcgtttttccataggctccgcccccctgacgagcatcacaaaaatcgacgctcaagtcagaggtggcgaaacccgacaggactataaagataccaggcgtttccccctggaagctccctcgtgcgctctcctgttccgaccctgccgcttaccggatacctgtccgcctttctcccttcgggaagcgtggcgctttctcatagctcacgctgtaggtatctcagttcggtgtaggtcgttcgctccaagctgggctgtgtgcacgaaccccccgttcagcccgaccgctgcgccttatccggtaactatcgtcttgagtccaacccggtaagacacgacttatcgccactggcagcagccactggtaacaggattagcagagcgaggtatgtaggcggtgctacagagttcttgaagtggtggcctaactacggctacactagaagaacagtatttggtatctgcgctctgctgaagccagttaccttcggaaaaagagttggtagctcttgatccggcaaacaaaccaccgctggtagcggtggtttttttgtttgcaagcagcagattacgcgcagaaaaaaaggatctcaagaagatcctttgatcttttctacggggtctgacgctcagtggaacgaaaactcacgttaagggattttggtcatgagattatcaaaaaggatcttcacctagatccttttgatccggaatta

SEQ ID NO: 115 - DNA, 17504 bp, synthetic construct
  source 1..17504: mol_type = other DNA
attcctgtggttggcatgcacatacaaatggacgaacggataaaccttttcacgcccttttaaatatccgattattctaataaacgctcttttctcttaggtttacccgccaatatatcctgtcaaacactgatagtttaaactggcactagcctaacggtgttgactaactaggccgcttccctaattagctaacccgggggcgcgccgggaccggaattcattatgtggtctaggtaggttctatatataagaaaacttgaaatgttctaaaaaaaaattcaagcccatgcatgattgaagcaaacggtatagcaacggtgttaacctgatctagtgatctcttgcaatccttaacggccacctaccgcaggtagcaaacggcgtccccctcctcgatatctccgcggcgacctctggctttttccgcggaattgcgcggtggggacggattccacgagaccgcgacgcaaccgcctctcgccgctgggccccacaccgctcggtgccgtagcctcacgggactctttctccctcctcccccgttataaattggcttcatcccctccttgcctcatccatccaaatcccagtccccaatcccatcccttcgtaggagaaattcatcgaagctaagcgaatcctcgcgatcctctcaaggtactgcgagttttcgatccccctctcgacccctcgtatgtttgtgtttgtcgtagcgtttgattaggtatgctttccctgtttgtgttcgtcgtagcgtttgattaggtatgctttccctgttcgtgttcatcgtagtgtttgattaggtcgtgtgaggcgatggcctgctcgcgtccttcgatctgtagtcgatttgcgggtcgtggtgtagatctgcgggctgtgatgaagttatttggtgtgatctgctcgcctgattctgcgggttggctcgagtagatatgatggttggaccggttggttcgtttaccgcgctagggttgggctgggatgatgttgcatgcgccgttgcgcgtgatcccgcagcaggacttgcgtttgattgccagatctcgttacgattatgtgatttggtttggactttttagatctgtagcttctgcttatgtgccagatgcgcctactgctcatatgcctgatgataatcataaatggctgtggaactaactagttgattgcggagtcatgtatcagctacaggtgtagggactagctacaggtgtagggacttgcgtctaattgtttggtcctttactcatgttgcaattatgcaatttagtttagattgtttgttccactcatctaggctgtaaaagggacactgcttagattgctgtttaatctttttagtagattatattatattggtaacttattacccctattacatgccatacgtgacttctgctcatgcctgatgataatcatagatcactgtggaattaattagttgattgttgaatcatgtttcatgtacataccacggcacaattgcttagttccttaacaaatgcaaattttactgatccatgtatgatttgcgtggttctctaatgtgaaatactatagctacttgttagtaagaatcaggttcgtatgcttaatgctgtatgtgccttctgctcatgcctgatgataatcatatatcactggaattaattagttgatcgtttaatcatatatcaagtacataccatgccacaatttttagtcacttaacccatgcagattgaactggtccctgcatgttttgctaaattgttctattctgattagaccatatatcatgtatttttttttggtaatggttctcttattttaaatgctatatagttctggtacttgttagaaagatctgcttcatagtttagttgcctatccctcgaattaggatgctgagcagctgatcctatagctttgtttcatgtatcaattcttttgtgttcaacagtcagtttttgttagattcattgtaacttatggtcgcttactcttctggtcctcaatgcttgcagggatcccctaaatagaccatgccgaagaagaagcgcaaggtcgggggcgggggctcaggcgggggcgggagcggcggcgggggctctgggggcggcggcagcggcgggggcggcagcgggggcggcgggtcgatgctgttccaggatttcactcatctgtaccctctctcaaagactgttcggttcgagctcaagcctattgggcggactctggagcacatccacgcgaagaacttcctcagccaggacgaaaccatggccgacatgtaccagaaggtcaaggtcatcctcgacgactaccacagggacttcatcgcggacatgatgggcgaggtgaagctgacgaagctcgccgagttctacgacgtctacctcaagttccgcaagaacccgaaggacgacggcctccagaagcagctcaaggacctgcaggccgtcctgaggaaggagtccgtcaagcccatcggcagcggcggcaagtacaagaccggctacgacaggctgttcggcgccaagctgttcaaggacggcaaggagctcggcgacctggcgaagttcgtgatcgcgcaggagggcgagagctcccccaagctggcccacctggcccacttcgagaagttcagcacgtacttcaccggcttccacgacaacaggaagaacatgtacagcgacgaggacaagcacacggccatcgcctaccgcctcatccacgagaacctgccccgcttcatcgacaacctgcagatcctgacgaccatcaagcagaagcactccgccctgtacgaccagatcatcaacgagctcaccgcgagcggcctcgacgtgtccctcgccagccacctcgacggctaccacaagctcctgacccaggagggcatcaccgcctacaaccgcatcatcggcgaggtgaacggctacaccaacaagcacaaccagatctgccacaagtccgagaggatcgccaagctcaggcccctgcacaagcagatcctcagcgacggcatgggcgtgagcttcctcccgtccaagttcgccgacgactccgagatgtgccaggccgtgaacgagttctacaggcactacaccgacgtgttcgccaaggtgcagtccctgttcgacggcttcgacgaccaccagaaggacggcatctacgtggagcacaagaacctgaacgagctgtccaagcaggccttcggcgactgggccctcctgggccgcgtgctggacggctactacgtggacgtcgtgaacccggagttcaacgagcgcttcgcgaaggcgaagacggacaacgcgaaggccaagctcaccaaggagaaggacaagttcatcaagggcgtccacagcctcgcgtccctggagcaggcgatcgagcaccacaccgcgcgccacgacgacgagtccgtgcaggccggcaagctcggccagtacttcaagcacggcctggccggcgtcgacaacccgatccagaagatccacaacaaccactccaccatcaagggcttcctggagagggagcgcccggcgggcgagcgcgcgctccccaagatcaagtccggcaagaaccccgagatgacgcagctcaggcagctgaaggagctgctcgacaacgcgctcaacgtggcgcacttcgccaagctgctcacgaccaagaccacgctggacaaccaggacggcaacttctacggcgagttcggcgtcctgtacgacgagctggcgaagatcccgaccctgtacaacaaggtccgcgactacctgagccagaagcccttctccaccgagaagtacaagctcaacttcggcaacccgaccctcctgaacggctgggacctcaacaaggagaaggacaacttcggcgtgatcctccagaaggacggctgctactacctcgccctgctggacaaggcgcacaagaaggtcttcgacaacgccccgaacaccggcaagaacgtgtaccagaagatggtgtacaagctgctccccggccccaacaagatgctgccgaaggtgttcttcgcgaagtccaacctcgactactacaaccccagcgccgagctcctggacaagtacgccaagggcacgcacaagaagggcgacaacttcaacctcaaggactgccacgcgctgatcgacttcttcaaggcgggcatcaacaagcaccccgagtggcagcacttcggcttcaagttcagcccgacctccagctacagggacctcagcgacttctaccgcgaggtggagccccagggctaccaggtgaagttcgtcgacatcaacgccgactacatcgacgagctcgtcgagcagggcaagctctacctgttccagatctacaacaaggacttctccccgaaggcccacggcaagccgaacctccacacgctctacttcaaggccctcttcagcgaggacaacctggccgacccgatctacaagctcaacggcgaggcgcagatcttctaccgcaaggccagcctgaagaaggaggagctggtggtccacagggccggcgaggtcctggccaacaagaacccggacaacccgaagaagaggcagttcgtctacgacatcatcaaggacaagaggtacacccaggacaagttcatgctccacgtcccgatcaccatgaacttcggcgtccagggcatgaccatcaaggagttcaacaagaaggtcaaccagagcatccagcagtacgacgaggtgaacgtcatcggcatcgaccgcggcgagaggcacctgctctacctgacggtcatcaactccaagggcgagatcctcgagcagcgcagcctgaacaccatccagcagttcgactaccagaagaagctggacaacagggagaaggagagggtggccgcccgcaaggcctggggcgagatcgaaacgatcaaggagctcaagtccggctacctcagccacgtcgtgcaccagatcaaccagctcatgctgaagtacaacgcgatcgtggtcctcgaggacctgaacttcggcttcaagaggggccgcttcaaggtggagaagcagatctaccagaacttcgagaacgccctgatcaagaagctcaaccacctggtcctcaaggacaaggcggacgacgagatcggcagctacaagaacgcgctccagctgaccaacaacttcacggacctcaagtccatcggcaagcagacgggcttcctgttctacgtgccggcgtggaacacctccaagatcgacccggaaaccggcttcgtcgacctgctcaagccgcgctacgagaacatcgcgcagtcccaggcgttcttcggcaagttcgacaagatctgctacaacaccgacaagggctacttcgagttccacatcgactacgcgaagttcaccgacaaggccaagaactccaggcagaagtgggccatctgcagccacggcgacaagcgctacgtgtacgacaagacggcgaaccagaacaagggcgcggccaagggcatcaacgtgaacgacgagctgaagtccctcttcgcgcgctaccacatcaacgacaagcagccgaacctcgtcatggacatctgccagaacaacgacaaggagttccacaagagcctgatgtgcctgctcaagaccctgctccagatgaggaactcgaacgccgcgaccggcgaggactacatcctcagccccgtcgcgaacgacgagggcgtgttcttcaactccgccctcgcggacgacacgcagccgcagaacgccgacgcgaacggcgcctaccacatcgccctcaagggcctgtggctgctcaacgagctcaagaactccgacgacctgaacaaggtgaagctcgccattgacaaccagacgtggctgaatttcgctcagaatagggggggcgggggctcaggcgggggcgggagcggcggcgggggctctgggggcggcggcagcggcgggggcggcagcgggggcggcgggtcgccgaagaagaagcgcaaggtgtccggcggcagctccggcggcagcccgaagaagaagcgcaaagtgtgagggacccgatcgttcaaacatttggcaataaagtttcttaagattgaatcctgttgccggtcttgcgatgattatcatataatttctgttgaattacgttaagcatgtaataattaacatgtaatgcatgacgttatttatgagatgggtttttatgattagagtcccgcaattatacatttaatacgcgatagaaaacaaaatatagcgcgcaaactaggataaattatcgcgcgcggtgtcatctatgttactagatcggtaccgaattcattatgtggtctaggtaggttctatatataagaaaacttgaaatgttctaaaaaaaaattcaagcccatgcatgattgaagcaaacggtatagcaacggtgttaacctgatctagtgatctcttgcaatccttaacggccacctaccgcaggtagcaaacggcgtccccctcctcgatatctccgcggcgacctctggctttttccgcggaattgcgcggtggggacggattccacgagaccgcgacgcaaccgcctctcgccgctgggccccacaccgctcggtgccgtagcctcacgggactctttctccctcctcccccgttataaattggcttcatcccctccttgcctcatccatccaaatcccagtccccaatcccatcccttcgtaggagaaattcatcgaagctaagcgaatcctcgcgatcctctcaaggtactgcgagttttcgatccccctctcgacccctcgtatgtttgtgtttgtcgtagcgtttgattaggtatgctttccctgtttgtgttcgtcgtagcgtttgattaggtatgctttccctgttcgtgttcatcgtagtgtttgattaggtcgtgtgaggcgatggcctgctcgcgtccttcgatctgtagtcgatttgcgggtcgtggtgtagatctgcgggctgtgatgaagttatttggtgtgatctgctcgcctgattctgcgggttggctcgagtagatatgatggttggaccggttggttcgtttaccgcgctagggttgggctgggatgatgttgcatgcgccgttgcgcgtgatcccgcagcaggacttgcgtttgattgccagatctcgttacgattatgtgatttggtttggactttttagatctgtagcttctgcttatgtgccagatgcgcctactgctcatatgcctgatgataatcataaatggctgtggaactaactagttgattgcggagtcatgtatcagctacaggtgtagggactagctacaggtgtagggacttgcgtctaattgtttggtcctttactcatgttgcaattatgcaatttagtttagattgtttgttccactcatctaggctgtaaaagggacactgcttagattgctgtttaatctttttagtagattatattatattggtaacttattacccctattacatgccatacgtgacttctgctcatgcctgatgataatcatagatcactgtggaattaattagttgattgttgaatcatgtttcatgtacataccacggcacaattgcttagttccttaacaaatgcaaattttactgatccatgtatgatttgcgtggttctctaatgtgaaatactatagctacttgttagtaagaatcaggttcgtatgcttaatgctgtatgtgccttctgctcatgcctgatgataatcatatatcactggaattaattagttgatcgtttaatcatatatcaagtacataccatgccacaatttttagtcacttaacccatgcagattgaactggtccctgcatgttttgctaaattgttctattctgattagaccatatatcatgtatttttttttggtaatggttctcttattttaaatgctatatagttctggtacttgttagaaagatctgcttcatagtttagttgcctatccctcgaattaggatgctgagcagctgatcctatagctttgtttcatgtatcaattcttttgtgttcaacagtcagtttttgttagattcattgtaacttatggtcgcttactcttctggtcctcaatgcttgcagaagcttgaaattctgatgagtccgtgaggacgaaacgagtaagctcgtcaatttctactgtttgtagatgggaaagaccgaggagaagatctaatttctactgtttgtagatgcaccaaggaaggggaggagatcaatttctactgtttgtagatgtcacagatcacaaacttcaaatgaatttctactgtttgtagatacgcccagaaagcatacgcagtcggccggcatggtcccagcctcctcgctggcgccggctgggcaacatgcttcggcatggcgaatgggacgatcgttcaaacatttggcaataaagtttcttaagattgaatcctgttgccggtcttgcgatgattatcatataatttctgttgaattacgttaagcatgtaataattaacatgtaatgcatgacgttatttatgagatgggtttttatgattagagtcccgcaattatacatttaatacgcgatagaaaacaaaatatagcgcgcaaactaggataaattatcgcgcgcggtgtcatctatgttactagatccctaggctgcagtgcagcgtgacccggtcgtgcccctctctagagataatgagcattgcatgtctaagttataaaaaattaccacatattttttttgtcacacttgtttgaagtgcagtttatctatctttatacatatatttaaactttactctacgaataatataatctatagtactacaataatatcagtgttttagagaatcatataaatgaacagttagacatggtctaaaggacaattgagtattttgacaacaggactctacagttttatctttttagtgtgcatgtgttctcctttttttttgcaaatagcttcacctatataatacttcatccattttattagtacatccatttagggtttagggttaatggtttttatagactaatttttttagtacatctattttattctattttagcctctaaattaagaaaactaaaactctattttagtttttttatttaataatttagatataaaatagaataaaataaagtgactaaaaattaaacaaataccctttaagaaattaaaaaaactaaggaaacatttttcttgtttcgagtagataatgccagcctgttaaacgccgtcgacgagtctaacggacaccaaccagcgaaccagcagcgtcgcgtcgggccaagcgaagcagacggcacggcatctctgtcgctgcctctggacccctctcgagagttccgctccaccgttggacttgctccgctgtcggcatccagaaattgcgtggcggagcggcagacgtgagccggcacggcaggcggcctcctcctcctctcacggcaccggcagctacgggggattcctttcccaccgctccttcgctttcccttcctcgcccgccgtaataaatagacaccccctccacaccctctttccccaacctcgtgttgttcggagcgcacacacacacaaccagatctcccccaaatccacccgtcggcacctccgcttcaaggtacgccgctcgtcctccccccccccccctctctaccttctctagatcggcgttccggtccatggttagggcccggtagttctacttctgttcatgtttgtgttagatccgtgtttgtgttagatccgtgctgctagcgttcgtacacggatgcgacctgtacgtcagacacgttctgattgctaacttgccagtgtttctctttggggaatcctgggatggctctagccgttccgcagacgggatcgatttcatgattttttttgtttcgttgcatagggtttggtttgcccttttcctttatttcaatatatgccgtgcacttgtttgtcgggtcatcttttcatgcttttttttgtcttggttgtgatgatgtggtctggttgggcggtcgttctagatcggagtagaattctgtttcaaactacctggtggatttattaattttggatctgtatgtgtgtgccatacatattcatagttacgaattgaagatgatggatggaaatatcgatctaggataggtatacatgttgatgcgggttttactgatgcatatacagagatgctttttgttcgcttggttgtgatgatgtggtgtggttgggcggtcgttcattcgttctagatcggagtagaatactgtttcaaactacctggtgtatttattaattttggaactgtatgtgtgtgtcatacatcttcatagttacgagtttaagatggatggaaatatcgatctaggataggtatacatgttgatgtgggttttactgatgcatatacatgatggcatatgcagcatctattcatatgctctaaccttgagtacctatctattataataaacaagtatgttttataattattttgatcttgatatacttggatgatggcatatgcagcagctatatgtggatttttttagccctgccttcatacgctatttatttgcttggtactgtttcttttgtcgatgctcaccctgttgtttggtgttacttctgcagggatcaccgatcatgcaaaaactcattaactcagtgcaaaactatgcctggggcagcaaaacggcgttgactgaactttatggtatggaaaatccgtccagccagccgatggccgagctgtggatgggcgcacatccgaaaagcagttcacgagtgcagaatgccgccggagatatcgtttcactgcgtgatgtgattgagagtgataaatcgactctgctcggagaggccgttgccaaacgctttggcgaactgcctttcctgttcaaagtattatgcgcagcacagccactctccattcaggttcatccaaacaaacacaattctgaaatcggttttgccaaagaaaatgccgcaggtatcccgatggatgccgccgagcgtaactataaagatcctaaccacaagccggagctggtttttgcgctgacgcctttccttgcgatgaacgcgtttcgtgaattttccgagattgtctccctactccagccggtcgcaggtgcacatccggcgattgctcactttttacaacagcctgatgccgaacgtttaagcgaactgttcgccagcctgttgaatatgcagggtgaagaaaaatcccgcgcgctggcgattttaaaatcggccctcgatagccagcagggtgaaccgtggcaaacgattcgtttaatttctgaattttacccggaagacagcggtctgttctccccgctattgctgaatgtggtgaaattgaaccctggcgaagcgatgttcctgttcgctgaaacaccgcacgcttacctgcaaggcgtggcgctggaagtgatggcaaactccgataacgtgctgcgtgcgggtctgacgcctaaatacattgatattccggaactggttgccaatgtgaaattcgaagccaaaccggctaaccagttgttgacccagccggtgaaacaaggtgcagaactggacttcccgattccagtggatgattttgccttctcgctgcatgaccttagtgataaagaaaccaccattagccagcagagtgccgccattttgttctgcgtcgaaggcgatgcaacgttgtggaaaggttctcagcagttacagcttaaaccgggtgaatcagcgtttattgccgccaacgaatcaccggtgactgtcaaaggccacggccgtttagcgcgtgtttacaacaagctgtaagagcttactgaaaaaattaacatctcttgctaagctgggagctcgatccgtcgacctgcagatcgttcaaacatttggcaataaagtttcttaagattgaatcctgttgccggtcttgcgatgattatcatataatttctgttgaattacgttaagcatgtaataattaacatgtaatgcatgacgttatttatgagatgggtttttatgattagagtcccgcaattatacatttaatacgcgatagaaaacaaaatatagcgcgcaaactaggataaattatcgcgcgcggtgtcatctatgttactagatccggaccgcctgcaggcccgggggcgcgccctaattagctaacggccaggatcgccgcgtgagcctttagcaactagctagattaattaacgcaatctgttattaagttgtctaagcgtcaatttgtttacaccacaatatatcctgccaccagccagccaacagctccccgaccggcagctcggcacaaaatcaccactcgatacaggcagcccatcagaattaattctcatgtttgacagcttatcatcgactgcacggtgcaccaatgcttctggcgtcaggcagccatcggaagctgtggtatggctgtgcaggtcgtaaatcactgcataattcgtgtcgctcaaggcgcactcccgttctggataatgttttttgcgccgacatcataacggttctggcaaatattctgaaatgagctgttgacaattaatcatccggctcgtataatgtgtggaattgtgagcggataacaatttcacacaggaaacagaccatgagggaagcgttgatcgccgaagtatcgactcaactatcagaggtagttggcgtcatcgagcgccatctcgaaccgacgttgctggccgtacatttgtacggctccgcagtggatggcggcctgaagccacacagtgatattgatttgctggttacggtgaccgtaaggcttgatgaaacaacgcggcgagctttgatcaacgaccttttggaaacttcggcttcccctggagagagcgagattctccgcgctgtagaagtcaccattgttgtgcacgacgacatcattccgtggcgttatccagctaagcgcgaactgcaatttggagaatggcagcgcaatgacattcttgcaggtatcttcgagccagccacgatcgacattgatctggctatcttgctgacaaaagcaagagaacatagcgttgccttggtaggtccagcggcggaggaactctttgatccggttcctgaacaggatctatttgaggcgctaaatgaaaccttaacgctatggaactcgccgcccgactgggctggcgatgagcgaaatgtagtgcttacgttgtcccgcatttggtacagcgcagtaaccggcaaaatcgcgccgaaggatgtcgctgccgactgggcaatggagcgcctgccggcccagtatcagcccgtcatacttgaagctaggcaggcttatcttggacaagaagatcgcttggcctcgcgcgcagatcagttggaagaatttgttcactacgtgaaaggcgagatcaccaaagtagtcggcaaataaagctctagtggatctccgtacccagggatctggctcgcggcggacgcacgacgccggggcgagaccataggcgatctcctaaatcaatagtagctgtaacctcgaagcgtttcacttgtaacaacgattgagaatttttgtcataaaattgaaatacttggttcgcatttttgtcatccgcggtcagccgcaattctgacgaactgcccatttagctggagatgattgtacatccttcacgtgaaaatttctcaagcgctgtgaacaagggttcagattttagattgaaaggtgagccgttgaaacacgttcttcttgtcgatgacgacgtcgctatgcggcatcttattattgaataccttacgatccacgccttcaaagtgaccgcggtagccgacagcacccagttcacaagagtactctcttccgcgacggtcgatgtcgtggttgttgatctagatttaggtcgtgaagatgggctcgagatcgttcgtaatctggcggcaaagtctgatattccaatcataattatcagtggcgaccgccttgaggagacggataaagttgttgcactcgagctaggagcaagtgattttatcgctaagccgttcagtatcagagagtttctagcacgcattcgggttgccttgcgcgtgcgccccaacgttgtccgctccaaagaccgacggtctttttgttttactgactggacacttaatctcaggcaacgtcgcttgatgtccgaagctggcggtgaggtgaaacttacggcaggtgagttcaatcttctcctcgcgtttttagagaaaccccgcgacgttctatcgcgcgagcaacttctcattgccagtcgagtacgcgacgaggaggtttatgacaggagtatagatgttctcattttgaggctgcgccgcaaacttgaggcagatccgtcaagccctcaactgataaaaacagcaagaggtgccggttatttctttgacgcggacgtgcaggtttcgcacggggggacgatggcagcctgagccaattcccagatccccgaggaatcggcgtgagcggtcgcaaaccatccggcccggtacaaatcggcgcggcgctgggtgatgacctggtggagaagttgaaggccgcgcaggccgcccagcggcaacgcatcgaggcagaagcacgccccggtgaatcgtggcaagcggccgctgatcgaatccgcaaagaatcccggcaaccgccggcagccggtgcgccgtcgattaggaagccgcccaagggcgacgagcaaccagattttttcgttccgatgctctatgacgtgggcacccgcgatagtcgcagcatcatggacgtggccgttttccgtctgtcgaagcgtgaccgacgagctggcgaggtgatccgctacgagcttccagacgggcacgtagaggtttccgcagggccggccggcatggccagtgtgtgggattacgacctggtactgatggcggtttcccatctaaccgaatccatgaaccgataccgggaagggaagggagacaagcccggccgcgtgttccgtccacacgttgcggacgtactcaagttctgccggcgagccgatggcggaaagcagaaagacgacctggtagaaacctgcattcggttaaacaccacgcacgttgccatgcagcgtacgaagaaggccaagaacggccgcctggtgacggtatccgagggtgaagccttgattagccgctacaagatcgtaaagagcgaaaccgggcggccggagtacatcgagatcgagctggctgattggatgtaccgcgagatcacagaaggcaagaacccggacgtgctgacggttcaccccgattactttttgatcgatcccggcatcggccgttttctctaccgcctggcacgccgcgccgcaggcaaggcagaagccagatggttgttcaagacgatctacgaacgcagtggcagcgccggagagttcaagaagttctgtttcaccgtgcgcaagctgatcgggtcaaatgacctgccggagtacgatttgaaggaggaggcggggcaggctggcccgatcctagtcatgcgctaccgcaacctgatcgagggcgaagcatccgccggttcctaatgtacggagcagatgctagggcaaattgccctagcaggggaaaaaggtcgaaaaggtctctttcctgtggatagcacgtacattgggaacccaaagccgtacattgggaaccggaacccgtacattgggaacccaaagccgtacattgggaaccggtcacacatgtaagtgactgatataaaagagaaaaaaggcgatttttccgcctaaaactctttaaaacttattaaaactcttaaaacccgcctggcctgtgcataactgtctggccagcgcacagccgaagagctgcaaaaagcgcctacccttcggtcgctgcgctccctacgccccgccgcttcgcgtcggcctatcgcggccgctggccgctcaaaaatggctggcctacggccaggcaatctaccagggcgcggacaagccgcgccgtcgccactcgaccgccggcgctgaggtctgcctcgtgaagaaggtgttgctgactcataccaggcctgaatcgccccatcatccagccagaaagtgagggagccacggttgatgagagctttgttgtaggtggaccagttggtgattttgaacttttgctttgccacggaacggtctgcgttgtcgggaagatgcgtgatctgatccttcaactcagcaaaagttcgatttattcaacaaagccgccgtcccgtcaagtcagcgtaatgctctgccagtgttacaaccaattaaccaattctgattagaaaaactcatcgagcatcaaatgaaactgcaatttattcatatcaggattatcaataccatatttttgaaaaagccgtttctgtaatgaaggagaaaactcaccgaggcagttccataggatggcaagatcctggtatcggtctgcgattccgactcgtccaacatcaatacaacctattaatttcccctcgtcaaaaataaggttatcaagtgagaaatcaccatgagtgacgactgaatccggtgagaatggcaaaagctctgcattaatgaatcggccaacgcgcggggagaggcggtttgcgtattgggcgctcttccgcttcctcgctcactgactcgctgcgctcggtcgttcggctgcggcgagcggtatcagctcactcaaaggcggtaatacggttatccacagaatcaggggataacgcaggaaagaacatgtgagcaaaaggccagcaaaaggccaggaaccgtaaaaaggccgcgttgctggcgtttttccataggctccgcccccctgacgagcatcacaaaaatcgacgctcaagtcagaggtggcgaaacccgacaggactataaagataccaggcgtttccccctggaagctccctcgtgcgctctcctgttccgaccctgccgcttaccggatacctgtccgcctttctcccttcgggaagcgtggcgctttctcatagctcacgctgtaggtatctcagttcggtgtaggtcgttcgctccaagctgggctgtgtgcacgaaccccccgttcagcccgaccgctgcgccttatccggtaactatcgtcttgagtccaacccggtaagacacgacttatcgccactggcagcagccactggtaacaggattagcagagcgaggtatgtaggcggtgctacagagttcttgaagtggtggcctaactacggctacactagaagaacagtatttggtatctgcgctctgctgaagccagttaccttcggaaaaagagttggtagctcttgatccggcaaacaaaccaccgctggtagcggtggtttttttgtttgcaagcagcagattacgcgcagaaaaaaaggatctcaagaagatcctttgatcttttctacggggtctgacgctcagtggaacgaaaactcacgttaagggattttggtcatgagattatcaaaaaggatcttcacctagatccttttgatccggaatta

SEQ ID NO: 116 - DNA, 17504 bp, synthetic construct
  source 1..17504: mol_type = other DNA
attcctgtggttggcatgcacatacaaatggacgaacggataaaccttttcacgcccttttaaatatccgattattctaataaacgctcttttctcttaggtttacccgccaatatatcctgtcaaacactgatagtttaaactggcactagcctaacggtgttgactaactaggccgcttccctaattagctaacccgggggcgcgccgggaccggaattcattatgtggtctaggtaggttctatatataagaaaacttgaaatgttctaaaaaaaaattcaagcccatgcatgattgaagcaaacggtatagcaacggtgttaacctgatctagtgatctcttgcaatccttaacggccacctaccgcaggtagcaaacggcgtccccctcctcgatatctccgcggcgacctctggctttttccgcggaattgcgcggtggggacggattccacgagaccgcgacgcaaccgcctctcgccgctgggccccacaccgctcggtgccgtagcctcacgggactctttctccctcctcccccgttataaattggcttcatcccctccttgcctcatccatccaaatcccagtccccaatcccatcccttcgtaggagaaattcatcgaagctaagcgaatcctcgcgatcctctcaaggtactgcgagttttcgatccccctctcgacccctcgtatgtttgtgtttgtcgtagcgtttgattaggtatgctttccctgtttgtgttcgtcgtagcgtttgattaggtatgctttccctgttcgtgttcatcgtagtgtttgattaggtcgtgtgaggcgatggcctgctcgcgtccttcgatctgtagtcgatttgcgggtcgtggtgtagatctgcgggctgtgatgaagttatttggtgtgatctgctcgcctgattctgcgggttggctcgagtagatatgatggttggaccggttggttcgtttaccgcgctagggttgggctgggatgatgttgcatgcgccgttgcgcgtgatcccgcagcaggacttgcgtttgattgccagatctcgttacgattatgtgatttggtttggactttttagatctgtagcttctgcttatgtgccagatgcgcctactgctcatatgcctgatgataatcataaatggctgtggaactaactagttgattgcggagtcatgtatcagctacaggtgtagggactagctacaggtgtagggacttgcgtctaattgtttggtcctttactcatgttgcaattatgcaatttagtttagattgtttgttccactcatctaggctgtaaaagggacactgcttagattgctgtttaatctttttagtagattatattatattggtaacttattacccctattacatgccatacgtgacttctgctcatgcctgatgataatcatagatcactgtggaattaattagttgattgttgaatcatgtttcatgtacataccacggcacaattgcttagttccttaacaaatgcaaattttactgatccatgtatgatttgcgtggttctctaatgtgaaatactatagctacttgttagtaagaatcaggttcgtatgcttaatgctgtatgtgccttctgctcatgcctgatgataatcatatatcactggaattaattagttgatcgtttaatcatatatcaagtacataccatgccacaatttttagtcacttaacccatgcagattgaactggtccctgcatgttttgctaaattgttctattctgattagaccatatatcatgtatttttttttggtaatggttctcttattttaaatgctatatagttctggtacttgttagaaagatctgcttcatagtttagttgcctatccctcgaattaggatgctgagcagctgatcctatagctttgtttcatgtatcaattcttttgtgttcaacagtcagtttttgttagattcattgtaacttatggtcgcttactcttctggtcctcaatgcttgcagggatcccctaaatagaccatgccgaagaagaagcgcaaggtcgggggcgggggctcaggcgggggcgggagcggcggcgggggctctgggggcggcggcagcggcgggggcggcagcgggggcggcgggtcgatgctgttccaggatttcactcatctgtaccctctctcaaagactgttcggttcgagctcaagcctattgggcggactctggagcacatccacgcgaagaacttcctcagccaggacgaaaccatggccgacatgtaccagaaggtcaaggtcatcctcgacgactaccacagggacttcatcgcggacatgatgggcgaggtgaagctgacgaagctcgccgagttctacgacgtctacctcaagttccgcaagaacccgaaggacgacggcctccagaagcagctcaaggacctgcaggccgtcctgaggaaggagtccgtcaagcccatcggcagcggcggcaagtacaagaccggctacgacaggctgttcggcgccaagctgttcaaggacggcaaggagctcggcgacctggcgaagttcgtgatcgcgcaggagggcgagagctcccccaagctggcccacctggcccacttcgagaagttcagcacgtacttcaccggcttccacaggaacaggaagaacatgtacagcgacgaggacaagcacacggccatcgcctaccgcctcatccacgagaacctgccccgcttcatcgacaacctgcagatcctgacgaccatcaagcagaagcactccgccctgtacgaccagatcatcaacgagctcaccgcgagcggcctcgacgtgtccctcgccagccacctcgacggctaccacaagctcctgacccaggagggcatcaccgcctacaaccgcatcatcggcgaggtgaacggctacaccaacaagcacaaccagatctgccacaagtccgagaggatcgccaagctcaggcccctgcacaagcagatcctcagcgacggcatgggcgtgagcttcctcccgtccaagttcgccgacgactccgagatgtgccaggccgtgaacgagttctacaggcactacaccgacgtgttcgccaaggtgcagtccctgttcgacggcttcgacgaccaccagaaggacggcatctacgtggagcacaagaacctgaacgagctgtccaagcaggccttcggcgactgggccctcctgggccgcgtgctggacggctactacgtggacgtcgtgaacccggagttcaacgagcgcttcgcgaaggcgaagacggacaacgcgaaggccaagctcaccaaggagaaggacaagttcatcaagggcgtccacagcctcgcgtccctggagcaggcgatcgagcaccacaccgcgcgccacgacgacgagtccgtgcaggccggcaagctcggccagtacttcaagcacggcctggccggcgtcgacaacccgatccagaagatccacaacaaccactccaccatcaagggcttcctggagagggagcgcccggcgggcgagcgcgcgctccccaagatcaagtccggcaagaaccccgagatgacgcagctcaggcagctgaaggagctgctcgacaacgcgctcaacgtggcgcacttcgccaagctgctcacgaccaagaccacgctggacaaccaggacggcaacttctacggcgagttcggcgtcctgtacgacgagctggcgaagatcccgaccctgtacaacaaggtccgcgactacctgagccagaagcccttctccaccgagaagtacaagctcaacttcggcaacccgaccctcctgaacggctgggacctcaacaaggagaaggacaacttcggcgtgatcctccagaaggacggctgctactacctcgccctgctggacaaggcgcacaagaaggtcttcgacaacgccccgaacaccggcaagaacgtgtaccagaagatggtgtacaagctgctccccggccccaacaagatgctgccgaaggtgttcttcgcgaagtccaacctcgactactacaaccccagcgccgagctcctggacaagtacgccaagggcacgcacaagaagggcgacaacttcaacctcaaggactgccacgcgctgatcgacttcttcaaggcgggcatcaacaagcaccccgagtggcagcacttcggcttcaagttcagcccgacctccagctacagggacctcagcgacttctaccgcgaggtggagccccagggctaccaggtgaagttcgtcgacatcaacgccgactacatcgacgagctcgtcgagcagggcaagctctacctgttccagatctacaacaaggacttctccccgaaggcccacggcaagccgaacctccacacgctctacttcaaggccctcttcagcgaggacaacctggccgacccgatctacaagctcaacggcgaggcgcagatcttctaccgcaaggccagcctgaagaaggaggagctggtggtccacagggccggcgaggtcctggccaacaagaacccggacaacccgaagaagaggcagttcgtctacgacatcatcaaggacaagaggtacacccaggacaagttcatgctccacgtcccgatcaccatgaacttcggcgtccagggcatgaccatcaaggagttcaacaagaaggtcaaccagagcatccagcagtacgacgaggtgaacgtcatcggcatcgaccgcggcgagaggcacctgctctacctgacggtcatcaactccaagggcgagatcctcgagcagcgcagcctgaacaccatccagcagttcgactaccagaagaagctggacaacagggagaaggagagggtggccgcccgcaaggcctggggcgagatcgaaacgatcaaggagctcaagtccggctacctcagccacgtcgtgcaccagatcaaccagctcatgctgaagtacaacgcgatcgtggtcctcgaggacctgaacttcggcttcaagaggggccgcttcaaggtggagaagcagatctaccagaacttcgagaacgccctgatcaagaagctcaaccacctggtcctcaaggacaaggcggacgacgagatcggcagctacaagaacgcgctccagctgaccaacaacttcacggacctcaagtccatcggcaagcagacgggcttcctgttctacgtgccggcgtggaacacctccaagatcgacccggaaaccggcttcgtcgacctgctcaagccgcgctacgagaacatcgcgcagtcccaggcgttcttcggcaagttcgacaagatctgctacaacaccgacaagggctacttcgagttccacatcgactacgcgaagttcaccgacaaggccaagaactccaggcagaagtgggccatctgcagccacggcgacaagcgctacgtgtacgacaagacggcgaaccagaacaagggcgcggccaagggcatcaacgtgaacgacgagctgaagtccctcttcgcgcgctaccacatcaacgacaagcagccgaacctcgtcatggacatctgccagaacaacgacaaggagttccacaagagcctgatgtgcctgctcaagaccctgctccagatgaggaactcgaacgccgcgaccggcgaggactacatcctcagccccgtcgcgaacgacgagggcgtgttcttcaactccgccctcgcggacgacacgcagccgcagaacgccgacgcgaacggcgcctaccacatcgccctcaagggcctgtggctgctcaacgagctcaagaactccgacgacctgaacaaggtgaagctcgccattgacaaccagacgtggctgaatttcgctcagaatagggggggcgggggctcaggcgggggcgggagcggcggcgggggctctgggggcggcggcagcggcgggggcggcagcgggggcggcgggtcgccgaagaagaagcgcaaggtgtccggcggcagctccggcggcagcccgaagaagaagcgcaaagtgtgagggacccgatcgttcaaacatttggcaataaagtttcttaagattgaatcctgttgccggtcttgcgatgattatcatataatttctgttgaattacgttaagcatgtaataattaacatgtaatgcatgacgttatttatgagatgggtttttatgattagagtcccgcaattatacatttaatacgcgatagaaaacaaaatatagcgcgcaaactaggataaattatcgcgcgcggtgtcatctatgttactagatcggtaccgaattcattatgtggtctaggtaggttctatatataagaaaacttgaaatgttctaaaaaaaaattcaagcccatgcatgattgaagcaaacggtatagcaacggtgttaacctgatctagtgatctcttgcaatccttaacggccacctaccgcaggtagcaaacggcgtccccctcctcgatatctccgcggcgacctctggctttttccgcggaattgcgcggtggggacggattccacgagaccgcgacgcaaccgcctctcgccgctgggccccacaccgctcggtgccgtagcctcacgggactctttctccctcctcccccgttataaattggcttcatcccctccttgcctcatccatccaaatcccagtccccaatcccatcccttcgtaggagaaattcatcgaagctaagcgaatcctcgcgatcctctcaaggtactgcgagttttcgatccccctctcgacccctcgtatgtttgtgtttgtcgtagcgtttgattaggtatgctttccctgtttgtgttcgtcgtagcgtttgattaggtatgctttccctgttcgtgttcatcgtagtgtttgattaggtcgtgtgaggcgatggcctgctcgcgtccttcgatctgtagtcgatttgcgggtcgtggtgtagatctgcgggctgtgatgaagttatttggtgtgatctgctcgcctgattctgcgggttggctcgagtagatatgatggttggaccggttggttcgtttaccgcgctagggttgggctgggatgatgttgcatgcgccgttgcgcgtgatcccgcagcaggacttgcgtttgattgccagatctcgttacgattatgtgatttggtttggactttttagatctgtagcttctgcttatgtgccagatgcgcctactgctcatatgcctgatgataatcataaatggctgtggaactaactagttgattgcggagtcatgtatcagctacaggtgtagggactagctacaggtgtagggacttgcgtctaattgtttggtcctttactcatgttgcaattatgcaatttagtttagattgtttgttccactcatctaggctgtaaaagggacactgcttagattgctgtttaatctttttagtagattatattatattggtaacttattacccctattacatgccatacgtgacttctgctcatgcctgatgataatcatagatcactgtggaattaattagttgattgttgaatcatgtttcatgtacataccacggcacaattgcttagttccttaacaaatgcaaattttactgatccatgtatgatttgcgtggttctctaatgtgaaatactatagctacttgttagtaagaatcaggttcgtatgcttaatgctgtatgtgccttctgctcatgcctgatgataatcatatatcactggaattaattagttgatcgtttaatcatatatcaagtacataccatgccacaatttttagtcacttaacccatgcagattgaactggtccctgcatgttttgctaaattgttctattctgattagaccatatatcatgtatttttttttggtaatggttctcttattttaaatgctatatagttctggtacttgttagaaagatctgcttcatagtttagttgcctatccctcgaattaggatgctgagcagctgatcctatagctttgtttcatgtatcaattcttttgtgttcaacagtcagtttttgttagattcattgtaacttatggtcgcttactcttctggtcctcaatgcttgcagaagcttgaaattctgatgagtccgtgaggacgaaacgagtaagctcgtcaatttctactgtttgtagatgggaaagaccgaggagaagatctaatttctactgtttgtagatgcaccaaggaaggggaggagatcaatttctactgtttgtagatgtcacagatcacaaacttcaaatgaatttctactgtttgtagatacgcccagaaagcatacgcagtcggccggcatggtcccagcctcctcgctggcgccggctgggcaacatgcttcggcatggcgaatgggacgatcgttcaaacatttggcaataaagtttcttaagattgaatcctgttgccggtcttgcgatgattatcatataatttctgttgaattacgttaagcatgtaataattaacatgtaatgcatgacgttatttatgagatgggtttttatgattagagtcccgcaattatacatttaatacgcgatagaaaacaaaatatagcgcgcaaactaggataaattatcgcgcgcggtgtcatctatgttactagatccctaggctgcagtgcagcgtgacccggtcgtgcccctctctagagataatgagcattgcatgtctaagttataaaaaattaccacatattttttttgtcacacttgtttgaagtgcagtttatctatctttatacatatatttaaactttactctacgaataatataatctatagtactacaataatatcagtgttttagagaatcatataaatgaacagttagacatggtctaaaggacaattgagtattttgacaacaggactctacagttttatctttttagtgtgcatgtgttctcctttttttttgcaaatagcttcacctatataatacttcatccattttattagtacatccatttagggtttagggttaatggtttttatagactaatttttttagtacatctattttattctattttagcctctaaattaagaaaactaaaactctattttagtttttttatttaataatttagatataaaatagaataaaataaagtgactaaaaattaaacaaataccctttaagaaattaaaaaaactaaggaaacatttttcttgtttcgagtagataatgccagcctgttaaacgccgtcgacgagtctaacggacaccaaccagcgaaccagcagcgtcgcgtcgggccaagcgaagcagacggcacggcatctctgtcgctgcctctggacccctctcgagagttccgctccaccgttggacttgctccgctgtcggcatccagaaattgcgtggcggagcggcagacgtgagccggcacggcaggcggcctcctcctcctctcacggcaccggcagctacgggggattcctttcccaccgctccttcgctttcccttcctcgcccgccgtaataaatagacaccccctccacaccctctttccccaacctcgtgttgttcggagcgcacacacacacaaccagatctcccccaaatccacccgtcggcacctccgcttcaaggtacgccgctcgtcctccccccccccccctctctaccttctctagatcggcgttccggtccatggttagggcccggtagttctacttctgttcatgtttgtgttagatccgtgtttgtgttagatccgtgctgctagcgttcgtacacggatgcgacctgtacgtcagacacgttctgattgctaacttgccagtgtttctctttggggaatcctgggatggctctagccgttccgcagacgggatcgatttcatgattttttttgtttcgttgcatagggtttggtttgcccttttcctttatttcaatatatgccgtgcacttgtttgtcgggtcatcttttcatgcttttttttgtcttggttgtgatgatgtggtctggttgggcggtcgttctagatcggagtagaattctgtttcaaactacctggtggatttattaattttggatctgtatgtgtgtgccatacatattcatagttacgaattgaagatgatggatggaaatatcgatctaggataggtatacatgttgatgcgggttttactgatgcatatacagagatgctttttgttcgcttggttgtgatgatgtggtgtggttgggcggtcgttcattcgttctagatcggagtagaatactgtttcaaactacctggtgtatttattaattttggaactgtatgtgtgtgtcatacatcttcatagttacgagtttaagatggatggaaatatcgatctaggataggtatacatgttgatgtgggttttactgatgcatatacatgatggcatatgcagcatctattcatatgctctaaccttgagtacctatctattataataaacaagtatgttttataattattttgatcttgatatacttggatgatggcatatgcagcagctatatgtggatttttttagccctgccttcatacgctatttatttgcttggtactgtttcttttgtcgatgctcaccctgttgtttggtgttacttctgcagggatcaccgatcatgcaaaaactcattaactcagtgcaaaactatgcctggggcagcaaaacggcgttgactgaactttatggtatggaaaatccgtccagccagccgatggccgagctgtggatgggcgcacatccgaaaagcagttcacgagtgcagaatgccgccggagatatcgtttcactgcgtgatgtgattgagagtgataaatcgactctgctcggagaggccgttgccaaacgctttggcgaactgcctttcctgttcaaagtattatgcgcagcacagccactctccattcaggttcatccaaacaaacacaattctgaaatcggttttgccaaagaaaatgccgcaggtatcccgatggatgccgccgagcgtaactataaagatcctaaccacaagccggagctggtttttgcgctgacgcctttccttgcgatgaacgcgtttcgtgaattttccgagattgtctccctactccagccggtcgcaggtgcacatccggcgattgctcactttttacaacagcctgatgccgaacgtttaagcgaactgttcgccagcctgttgaatatgcagggtgaagaaaaatcccgcgcgctggcgattttaaaatcggccctcgatagccagcagggtgaaccgtggcaaacgattcgtttaatttctgaattttacccggaagacagcggtctgttctccccgctattgctgaatgtggtgaaattgaaccctggcgaagcgatgttcctgttcgctgaaacaccgcacgcttacctgcaaggcgtggcgctggaagtgatggcaaactccgataacgtgctgcgtgcgggtctgacgcctaaatacattgatattccggaactggttgccaatgtgaaattcgaagccaaaccggctaaccagttgttgacccagccggtgaaacaaggtgcagaactggacttcccgattccagtggatgattttgccttctcgctgcatgaccttagtgataaagaaaccaccattagccagcagagtgccgccattttgttctgcgtcgaaggcgatgcaacgttgtggaaaggttctcagcagttacagcttaaaccgggtgaatcagcgtttattgccgccaacgaatcaccggtgactgtcaaaggccacggccgtttagcgcgtgtttacaacaagctgtaagagcttactgaaaaaattaacatctcttgctaagctgggagctcgatccgtcgacctgcagatcgttcaaacatttggcaataaagtttcttaagattgaatcctgttgccggtcttgcgatgattatcatataatttctgttgaattacgttaagcatgtaataattaacatgtaatgcatgacgttatttatgagatgggtttttatgattagagtcccgcaattatacatttaatacgcgatagaaaacaaaatatagcgcgcaaactaggataaattatcgcgcgcggtgtcatctatgttactagatccggaccgcctgcaggcccgggggcgcgccctaattagctaacggccaggatcgccgcgtgagcctttagcaactagctagattaattaacgcaatctgttattaagttgtctaagcgtcaatttgtttacaccacaatatatcctgccaccagccagccaacagctccccgaccggcagctcggcacaaaatcaccactcgatacaggcagcccatcagaattaattctcatgtttgacagcttatcatcgactgcacggtgcaccaatgcttctggcgtcaggcagccatcggaagctgtggtatggctgtgcaggtcgtaaatcactgcataattcgtgtcgctcaaggcgcactcccgttctggataatgttttttgcgccgacatcataacggttctggcaaatattctgaaatgagctgttgacaattaatcatccggctcgtataatgtgtggaattgtgagcggataacaatttcacacaggaaacagaccatgagggaagcgttgatcgccgaagtatcgactcaactatcagaggtagttggcgtcatcgagcgccatctcgaaccgacgttgctggccgtacatttgtacggctccgcagtggatggcggcctgaagccacacagtgatattgatttgctggttacggtgaccgtaaggcttgatgaaacaacgcggcgagctttgatcaacgaccttttggaaacttcggcttcccctggagagagcgagattctccgcgctgtagaagtcaccattgttgtgcacgacgacatcattccgtggcgttatccagctaagcgcgaactgcaatttggagaatggcagcgcaatgacattcttgcaggtatcttcgagccagccacgatcgacattgatctggctatcttgctgacaaaagcaagagaacatagcgttgccttggtaggtccagcggcggaggaactctttgatccggttcctgaacaggatctatttgaggcgctaaatgaaaccttaacgctatggaactcgccgcccgactgggctggcgatgagcgaaatgtagtgcttacgttgtcccgcatttggtacagcgcagtaaccggcaaaatcgcgccgaaggatgtcgctgccgactgggcaatggagcgcctgccggcccagtatcagcccgtcatacttgaagctaggcaggcttatcttggacaagaagatcgcttggcctcgcgcgcagatcagttggaagaatttgttcactacgtgaaaggcgagatcaccaaagtagtcggcaaataaagctctagtggatctccgtacccagggatctggctcgcggcggacgcacgacgccggggcgagaccataggcgatctcctaaatcaatagtagctgtaacctcgaagcgtttcacttgtaacaacgattgagaatttttgtcataaaattgaaatacttggttcgcatttttgtcatccgcggtcagccgcaattctgacgaactgcccatttagctggagatgattgtacatccttcacgtgaaaatttctcaagcgctgtgaacaagggttcagattttagattgaaaggtgagccgttgaaacacgttcttcttgtcgatgacgacgtcgctatgcggcatcttattattgaataccttacgatccacgccttcaaagtgaccgcggtagccgacagcacccagttcacaagagtactctcttccgcgacggtcgatgtcgtggttgttgatctagatttaggtcgtgaagatgggctcgagatcgttcgtaatctggcggcaaagtctgatattccaatcataattatcagtggcgaccgccttgaggagacggataaagttgttgcactcgagctaggagcaagtgattttatcgctaagccgttcagtatcagagagtttctagcacgcattcgggttgccttgcgcgtgcgccccaacgttgtccgctccaaagaccgacggtctttttgttttactgactggacacttaatctcaggcaacgtcgcttgatgtccgaagctggcggtgaggtgaaacttacggcaggtgagttcaatcttctcctcgcgtttttagagaaaccccgcgacgttctatcgcgcgagcaacttctcattgccagtcgagtacgcgacgaggaggtttatgacaggagtatagatgttctcattttgaggctgcgccgcaaacttgaggcagatccgtcaagccctcaactgataaaaacagcaagaggtgccggttatttctttgacgcggacgtgcaggtttcgcacggggggacgatggcagcctgagccaattcccagatccccgaggaatcggcgtgagcggtcgcaaaccatccggcccggtacaaatcggcgcggcgctgggtgatgacctggtggagaagttgaaggccgcgcaggccgcccagcggcaacgcatcgaggcagaagcacgccccggtgaatcgtggcaagcggccgctgatcgaatccgcaaagaatcccggcaaccgccggcagccggtgcgccgtcgattaggaagccgcccaagggcgacgagcaaccagattttttcgttccgatgctctatgacgtgggcacccgcgatagtcgcagcatcatggacgtggccgttttccgtctgtcgaagcgtgaccgacgagctggcgaggtgatccgctacgagcttccagacgggcacgtagaggtttccgcagggccggccggcatggccagtgtgtgggattacgacctggtactgatggcggtttcccatctaaccgaatccatgaaccgataccgggaagggaagggagacaagcccggccgcgtgttccgtccacacgttgcggacgtactcaagttctgccggcgagccgatggcggaaagcagaaagacgacctggtagaaacctgcattcggttaaacaccacgcacgttgccatgcagcgtacgaagaaggccaagaacggccgcctggtgacggtatccgagggtgaagccttgattagccgctacaagatcgtaaagagcgaaaccgggcggccggagtacatcgagatcgagctggctgattggatgtaccgcgagatcacagaaggcaagaacccggacgtgctgacggttcaccccgattactttttgatcgatcccggcatcggccgttttctctaccgcctggcacgccgcgccgcaggcaaggcagaagccagatggttgttcaagacgatctacgaacgcagtggcagcgccggagagttcaagaagttctgtttcaccgtgcgcaagctgatcgggtcaaatgacctgccggagtacgatttgaaggaggaggcggggcaggctggcccgatcctagtcatgcgctaccgcaacctgatcgagggcgaagcatccgccggttcctaatgtacggagcagatgctagggcaaattgccctagcaggggaaaaaggtcgaaaaggtctctttcctgtggatagcacgtacattgggaacccaaagccgtacattgggaaccggaacccgtacattgggaacccaaagccgtacattgggaaccggtcacacatgtaagtgactgatataaaagagaaaaaaggcgatttttccgcctaaaactctttaaaacttattaaaactcttaaaacccgcctggcctgtgcataactgtctggccagcgcacagccgaagagctgcaaaaagcgcctacccttcggtcgctgcgctccctacgccccgccgcttcgcgtcggcctatcgcggccgctggccgctcaaaaatggctggcctacggccaggcaatctaccagggcgcggacaagccgcgccgtcgccactcgaccgccggcgctgaggtctgcctcgtgaagaaggtgttgctgactcataccaggcctgaatcgccccatcatccagccagaaagtgagggagccacggttgatgagagctttgttgtaggtggaccagttggtgattttgaacttttgctttgccacggaacggtctgcgttgtcgggaagatgcgtgatctgatccttcaactcagcaaaagttcgatttattcaacaaagccgccgtcccgtcaagtcagcgtaatgctctgccagtgttacaaccaattaaccaattctgattagaaaaactcatcgagcatcaaatgaaactgcaatttattcatatcaggattatcaataccatatttttgaaaaagccgtttctgtaatgaaggagaaaactcaccgaggcagttccataggatggcaagatcctggtatcggtctgcgattccgactcgtccaacatcaatacaacctattaatttcccctcgtcaaaaataaggttatcaagtgagaaatcaccatgagtgacgactgaatccggtgagaatggcaaaagctctgcattaatgaatcggccaacgcgcggggagaggcggtttgcgtattgggcgctcttccgcttcctcgctcactgactcgctgcgctcggtcgttcggctgcggcgagcggtatcagctcactcaaaggcggtaatacggttatccacagaatcaggggataacgcaggaaagaacatgtgagcaaaaggccagcaaaaggccaggaaccgtaaaaaggccgcgttgctggcgtttttccataggctccgcccccctgacgagcatcacaaaaatcgacgctcaagtcagaggtggcgaaacccgacaggactataaagataccaggcgtttccccctggaagctccctcgtgcgctctcctgttccgaccctgccgcttaccggatacctgtccgcctttctcccttcgggaagcgtggcgctttctcatagctcacgctgtaggtatctcagttcggtgtaggtcgttcgctccaagctgggctgtgtgcacgaaccccccgttcagcccgaccgctgcgccttatccggtaactatcgtcttgagtccaacccggtaagacacgacttatcgccactggcagcagccactggtaacaggattagcagagcgaggtatgtaggcggtgctacagagttcttgaagtggtggcctaactacggctacactagaagaacagtatttggtatctgcgctctgctgaagccagttaccttcggaaaaagagttggtagctcttgatccggcaaacaaaccaccgctggtagcggtggtttttttgtttgcaagcagcagattacgcgcagaaaaaaaggatctcaagaagatcctttgatcttttctacggggtctgacgctcagtggaacgaaaactcacgttaagggattttggtcatgagattatcaaaaaggatcttcacctagatccttttgatccggaatta

SEQ ID NO: 117 - DNA, 17504 bp, synthetic construct
  source 1..17504: mol_type = other DNA
attcctgtggttggcatgcacatacaaatggacgaacggataaaccttttcacgcccttttaaatatccgattattctaataaacgctcttttctcttaggtttacccgccaatatatcctgtcaaacactgatagtttaaactggcactagcctaacggtgttgactaactaggccgcttccctaattagctaacccgggggcgcgccgggaccggaattcattatgtggtctaggtaggttctatatataagaaaacttgaaatgttctaaaaaaaaattcaagcccatgcatgattgaagcaaacggtatagcaacggtgttaacctgatctagtgatctcttgcaatccttaacggccacctaccgcaggtagcaaacggcgtccccctcctcgatatctccgcggcgacctctggctttttccgcggaattgcgcggtggggacggattccacgagaccgcgacgcaaccgcctctcgccgctgggccccacaccgctcggtgccgtagcctcacgggactctttctccctcctcccccgttataaattggcttcatcccctccttgcctcatccatccaaatcccagtccccaatcccatcccttcgtaggagaaattcatcgaagctaagcgaatcctcgcgatcctctcaaggtactgcgagttttcgatccccctctcgacccctcgtatgtttgtgtttgtcgtagcgtttgattaggtatgctttccctgtttgtgttcgtcgtagcgtttgattaggtatgctttccctgttcgtgttcatcgtagtgtttgattaggtcgtgtgaggcgatggcctgctcgcgtccttcgatctgtagtcgatttgcgggtcgtggtgtagatctgcgggctgtgatgaagttatttggtgtgatctgctcgcctgattctgcgggttggctcgagtagatatgatggttggaccggttggttcgtttaccgcgctagggttgggctgggatgatgttgcatgcgccgttgcgcgtgatcccgcagcaggacttgcgtttgattgccagatctcgttacgattatgtgatttggtttggactttttagatctgtagcttctgcttatgtgccagatgcgcctactgctcatatgcctgatgataatcataaatggctgtggaactaactagttgattgcggagtcatgtatcagctacaggtgtagggactagctacaggtgtagggacttgcgtctaattgtttggtcctttactcatgttgcaattatgcaatttagtttagattgtttgttccactcatctaggctgtaaaagggacactgcttagattgctgtttaatctttttagtagattatattatattggtaacttattacccctattacatgccatacgtgacttctgctcatgcctgatgataatcatagatcactgtggaattaattagttgattgttgaatcatgtttcatgtacataccacggcacaattgcttagttccttaacaaatgcaaattttactgatccatgtatgatttgcgtggttctctaatgtgaaatactatagctacttgttagtaagaatcaggttcgtatgcttaatgctgtatgtgccttctgctcatgcctgatgataatcatatatcactggaattaattagttgatcgtttaatcatatatcaagtacataccatgccacaatttttagtcacttaacccatgcagattgaactggtccctgcatgttttgctaaattgttctattctgattagaccatatatcatgtatttttttttggtaatggttctcttattttaaatgctatatagttctggtacttgttagaaagatctgcttcatagtttagttgcctatccctcgaattaggatgctgagcagctgatcctatagctttgtttcatgtatcaattcttttgtgttcaacagtcagtttttgttagattcattgtaacttatggtcgcttactcttctggtcctcaatgcttgcagggatcccctaaatagaccatgccgaagaagaagcgcaaggtcgggggcgggggctcaggcgggggcgggagcggcggcgggggctctgggggcggcggcagcggcgggggcggcagcgggggcggcgggtcgatgctgttccaggatttcactcatctgtaccctctctcaaagactgttcggttcgagctcaagcctattgggcggactctggagcacatccacgcgaagaacttcctcagccaggacgaaaccatggccgacatgtaccagaaggtcaaggtcatcctcgacgactaccacagggacttcatcgcggacatgatgggcgaggtgaagctgacgaagctcgccgagttctacgacgtctacctcaagttccgcaagaacccgaaggacgacggcctccagaagcagctcaaggacctgcaggccgtcctgaggaaggagtccgtcaagcccatcggcagcggcggcaagtacaagaccggctacgacaggctgttcggcgccaagctgttcaaggacggcaaggagctcggcgacctggcgaagttcgtgatcgcgcaggagggcgagagctcccccaagctggcccacctggcccacttcgagaagttcagcacgtacttcaccggcttccacgacaacaggaagaacatgtacagcgacgaggacaagcacacggccatcgcctaccgcctcatccacgagaacctgccccgcttcatcgacaacctgcagatcctgacgaccatcaagcagaagcactccgccctgtacgaccagatcatcaacgagctcaccgcgagcggcctcgacgtgtccctcgccagccacctcgacggctaccacaagctcctgacccaggagggcatcaccgcctacaaccgcatcatcggcgaggtgaacggctacaccaacaagcacaaccagatctgccacaagtccgagaggatcgccaagctcaggcccctgcacaagcagatcctcagcgacggcatgggcgtgagcttcctcccgtccaagttcgccgacgactccgagatgtgccaggccgtgaacgagttctacaggcactacaccgacgtgttcgccaaggtgcagtccctgttcgacggcttcgacgaccaccagaaggacggcatctacgtggagcacaagaacctgaacgagctgtccaagcaggccttcggcgacttcgccctcctgggccgcgtgctggacggctactacgtggacgtcgtgaacccggagttcaacgagcgcttcgcgaaggcgaagacggacaacgcgaaggccaagctcaccaaggagaaggacaagttcatcaagggcgtccacagcctcgcgtccctggagcaggcgatcgagcaccacaccgcgcgccacgacgacgagtccgtgcaggccggcaagctcggccagtacttcaagcacggcctggccggcgtcgacaacccgatccagaagatccacaacaaccactccaccatcaagggcttcctggagagggagcgcccggcgggcgagcgcgcgctccccaagatcaagtccggcaagaaccccgagatgacgcagctcaggcagctgaaggagctgctcgacaacgcgctcaacgtggcgcacttcgccaagctgctcacgaccaagaccacgctggacaaccaggacggcaacttctacggcgagttcggcgtcctgtacgacgagctggcgaagatcccgaccctgtacaacaaggtccgcgactacctgagccagaagcccttctccaccgagaagtacaagctcaacttcggcaacccgaccctcctgaacggctgggacctcaacaaggagaaggacaacttcggcgtgatcctccagaaggacggctgctactacctcgccctgctggacaaggcgcacaagaaggtcttcgacaacgccccgaacaccggcaagaacgtgtaccagaagatggtgtacaagctgctccccggccccaacaagatgctgccgaaggtgttcttcgcgaagtccaacctcgactactacaaccccagcgccgagctcctggacaagtacgccaagggcacgcacaagaagggcgacaacttcaacctcaaggactgccacgcgctgatcgacttcttcaaggcgggcatcaacaagcaccccgagtggcagcacttcggcttcaagttcagcccgacctccagctacagggacctcagcgacttctaccgcgaggtggagccccagggctaccaggtgaagttcgtcgacatcaacgccgactacatcgacgagctcgtcgagcagggcaagctctacctgttccagatctacaacaaggacttctccccgaaggcccacggcaagccgaacctccacacgctctacttcaaggccctcttcagcgaggacaacctggccgacccgatctacaagctcaacggcgaggcgcagatcttctaccgcaaggccagcctggacatgaacgaaacgaccatccacagggccggcgaggtcctggccaacaagaacccggacaacccgaagaagaggcagttcgtctacgacatcatcaaggacaagaggtacacccaggacaagttcatgctccacgtcccgatcaccatgaacttcggcgtccagggcatgaccatcaaggagttcaacaagaaggtcaaccagagcatccagcagtacgacgaggtgaacgtcatcggcatcgaccgcggcgagaggcacctgctctacctgacggtcatcaactccaagggcgagatcctcgagcagcgcagcctgaacaccatccagcagttcgactaccagaagaagctggacaacagggagaaggagagggtggccgcccgccaggcctggggcgagatcgaaacgatcaaggagctcaagtccggctacctcagccacgtcgtgcaccagatcaaccagctcatgctgaagtacaacgcgatcgtggtcctcgaggacctgaacttcggcttcaagaggggccgcttcaaggtggagaagcagatctaccagaacttcgagaacgccctgatcaagaagctcaaccacctggtcctcaaggacaaggcggacgacgagatcggcagctacaagaacgcgctccagctgaccaacaacttcacggacctcaagtccatcggcaagcagacgggcttcctgttctacgtgccggcgtggaacacctccaagatcgacccggaaaccggcttcgtcgacctgctcaagccgcgctacgagaacatcgcgcagtcccaggcgttcttcggcaagttcgacaagatctgctacaacaccgacaagggctacttcgagttccacatcgactacgcgaagttcaccgacaaggccaagaactccaggcagaagtgggccatctgcagccacggcgacaagcgctacgtgtacgacaagacggcgaaccagaacaagggcgcggccaagggcatcaacgtgaacgacgagctgaagtccctcttcgcgcgctaccacatcaacgacaagcagccgaacctcgtcatggacatctgccagaacaacgacaaggagttccacaagagcctgatgtgcctgctcaagaccctgctcgccctccgctactccaacgcgagctccgacgaggacttcatcctcagccccgtcgcgaacgacgagggcgtgttcttcaactccgccctcgcggacgacacgcagccgcagaacgccgacgcgaacggcgcctaccacatcgccctcaagggcctgtggctgctcaacgagctcaagaactccgacgacctgaacaaggtgaagctcgccattgacaaccagacgtggctgaatttcgctcagaatagggggggcgggggctcaggcgggggcgggagcggcggcgggggctctgggggcggcggcagcggcgggggcggcagcgggggcggcgggtcgccgaagaagaagcgcaaggtgtccggcggcagctccggcggcagcccgaagaagaagcgcaaagtgtgagggacccgatcgttcaaacatttggcaataaagtttcttaagattgaatcctgttgccggtcttgcgatgattatcatataatttctgttgaattacgttaagcatgtaataattaacatgtaatgcatgacgttatttatgagatgggtttttatgattagagtcccgcaattatacatttaatacgcgatagaaaacaaaatatagcgcgcaaactaggataaattatcgcgcgcggtgtcatctatgttactagatcggtaccgaattcattatgtggtctaggtaggttctatatataagaaaacttgaaatgttctaaaaaaaaattcaagcccatgcatgattgaagcaaacggtatagcaacggtgttaacctgatctagtgatctcttgcaatccttaacggccacctaccgcaggtagcaaacggcgtccccctcctcgatatctccgcggcgacctctggctttttccgcggaattgcgcggtggggacggattccacgagaccgcgacgcaaccgcctctcgccgctgggccccacaccgctcggtgccgtagcctcacgggactctttctccctcctcccccgttataaattggcttcatcccctccttgcctcatccatccaaatcccagtccccaatcccatcccttcgtaggagaaattcatcgaagctaagcgaatcctcgcgatcctctcaaggtactgcgagttttcgatccccctctcgacccctcgtatgtttgtgtttgtcgtagcgtttgattaggtatgctttccctgtttgtgttcgtcgtagcgtttgattaggtatgctttccctgttcgtgttcatcgtagtgtttgattaggtcgtgtgaggcgatggcctgctcgcgtccttcgatctgtagtcgatttgcgggtcgtggtgtagatctgcgggctgtgatgaagttatttggtgtgatctgctcgcctgattctgcgggttggctcgagtagatatgatggttggaccggttggttcgtttaccgcgctagggttgggctgggatgatgttgcatgcgccgttgcgcgtgatcccgcagcaggacttgcgtttgattgccagatctcgttacgattatgtgatttggtttggactttttagatctgtagcttctgcttatgtgccagatgcgcctactgctcatatgcctgatgataatcataaatggctgtggaactaactagttgattgcggagtcatgtatcagctacaggtgtagggactagctacaggtgtagggacttgcgtctaattgtttggtcctttactcatgttgcaattatgcaatttagtttagattgtttgttccactcatctaggctgtaaaagggacactgcttagattgctgtttaatctttttagtagattatattatattggtaacttattacccctattacatgccatacgtgacttctgctcatgcctgatgataatcatagatcactgtggaattaattagttgattgttgaatcatgtttcatgtacataccacggcacaattgcttagttccttaacaaatgcaaattttactgatccatgtatgatttgcgtggttctctaatgtgaaatactatagctacttgttagtaagaatcaggttcgtatgcttaatgctgtatgtgccttctgctcatgcctgatgataatcatatatcactggaattaattagttgatcgtttaatcatatatcaagtacataccatgccacaatttttagtcacttaacccatgcagattgaactggtccctgcatgttttgctaaattgttctattctgattagaccatatatcatgtatttttttttggtaatggttctcttattttaaatgctatatagttctggtacttgttagaaagatctgcttcatagtttagttgcctatccctcgaattaggatgctgagcagctgatcctatagctttgtttcatgtatcaattcttttgtgttcaacagtcagtttttgttagattcattgtaacttatggtcgcttactcttctggtcctcaatgcttgcagaagcttgaaattctgatgagtccgtgaggacgaaacgagtaagctcgtcaatttctactgtttgtagatgggaaagaccgaggagaagatctaatttctactgtttgtagatgcaccaaggaaggggaggagatcaatttctactgtttgtagatgtcacagatcacaaacttcaaatgaatttctactgtttgtagatacgcccagaaagcatacgcagtcggccggcatggtcccagcctcctcgctggcgccggctgggcaacatgcttcggcatggcgaatgggacgatcgttcaaacatttggcaataaagtttcttaagattgaatcctgttgccggtcttgcgatgattatcatataatttctgttgaattacgttaagcatgtaataattaacatgtaatgcatgacgttatttatgagatgggtttttatgattagagtcccgcaattatacatttaatacgcgatagaaaacaaaatatagcgcgcaaactaggataaattatcgcgcgcggtgtcatctatgttactagatccctaggctgcagtgcagcgtgacccggtcgtgcccctctctagagataatgagcattgcatgtctaagttataaaaaattaccacatattttttttgtcacacttgtttgaagtgcagtttatctatctttatacatatatttaaactttactctacgaataatataatctatagtactacaataatatcagtgttttagagaatcatataaatgaacagttagacatggtctaaaggacaattgagtattttgacaacaggactctacagttttatctttttagtgtgcatgtgttctcctttttttttgcaaatagcttcacctatataatacttcatccattttattagtacatccatttagggtttagggttaatggtttttatagactaatttttttagtacatctattttattctattttagcctctaaattaagaaaactaaaactctattttagtttttttatttaataatttagatataaaatagaataaaataaagtgactaaaaattaaacaaataccctttaagaaattaaaaaaactaaggaaacatttttcttgtttcgagtagataatgccagcctgttaaacgccgtcgacgagtctaacggacaccaaccagcgaaccagcagcgtcgcgtcgggccaagcgaagcagacggcacggcatctctgtcgctgcctctggacccctctcgagagttccgctccaccgttggacttgctccgctgtcggcatccagaaattgcgtggcggagcggcagacgtgagccggcacggcaggcggcctcctcctcctctcacggcaccggcagctacgggggattcctttcccaccgctccttcgctttcccttcctcgcccgccgtaataaatagacaccccctccacaccctctttccccaacctcgtgttgttcggagcgcacacacacacaaccagatctcccccaaatccacccgtcggcacctccgcttcaaggtacgccgctcgtcctccccccccccccctctctaccttctctagatcggcgttccggtccatggttagggcccggtagttctacttctgttcatgtttgtgttagatccgtgtttgtgttagatccgtgctgctagcgttcgtacacggatgcgacctgtacgtcagacacgttctgattgctaacttgccagtgtttctctttggggaatcctgggatggctctagccgttccgcagacgggatcgatttcatgattttttttgtttcgttgcatagggtttggtttgcccttttcctttatttcaatatatgccgtgcacttgtttgtcgggtcatcttttcatgcttttttttgtcttggttgtgatgatgtggtctggttgggcggtcgttctagatcggagtagaattctgtttcaaactacctggtggatttattaattttggatctgtatgtgtgtgccatacatattcatagttacgaattgaagatgatggatggaaatatcgatctaggataggtatacatgttgatgcgggttttactgatgcatatacagagatgctttttgttcgcttggttgtgatgatgtggtgtggttgggcggtcgttcattcgttctagatcggagtagaatactgtttcaaactacctggtgtatttattaattttggaactgtatgtgtgtgtcatacatcttcatagttacgagtttaagatggatggaaatatcgatctaggataggtatacatgttgatgtgggttttactgatgcatatacatgatggcatatgcagcatctattcatatgctctaaccttgagtacctatctattataataaacaagtatgttttataattattttgatcttgatatacttggatgatggcatatgcagcagctatatgtggatttttttagccctgccttcatacgctatttatttgcttggtactgtttcttttgtcgatgctcaccctgttgtttggtgttacttctgcagggatcaccgatcatgcaaaaactcattaactcagtgcaaaactatgcctggggcagcaaaacggcgttgactgaactttatggtatggaaaatccgtccagccagccgatggccgagctgtggatgggcgcacatccgaaaagcagttcacgagtgcagaatgccgccggagatatcgtttcactgcgtgatgtgattgagagtgataaatcgactctgctcggagaggccgttgccaaacgctttggcgaactgcctttcctgttcaaagtattatgcgcagcacagccactctccattcaggttcatccaaacaaacacaattctgaaatcggttttgccaaagaaaatgccgcaggtatcccgatggatgccgccgagcgtaactataaagatcctaaccacaagccggagctggtttttgcgctgacgcctttccttgcgatgaacgcgtttcgtgaattttccgagattgtctccctactccagccggtcgcaggtgcacatccggcgattgctcactttttacaacagcctgatgccgaacgtttaagcgaactgttcgccagcctgttgaatatgcagggtgaagaaaaatcccgcgcgctggcgattttaaaatcggccctcgatagccagcagggtgaaccgtggcaaacgattcgtttaatttctgaattttacccggaagacagcggtctgttctccccgctattgctgaatgtggtgaaattgaaccctggcgaagcgatgttcctgttcgctgaaacaccgcacgcttacctgcaaggcgtggcgctggaagtgatggcaaactccgataacgtgctgcgtgcgggtctgacgcctaaatacattgatattccggaactggttgccaatgtgaaattcgaagccaaaccggctaaccagttgttgacccagccggtgaaacaaggtgcagaactggacttcccgattccagtggatgattttgccttctcgctgcatgaccttagtgataaagaaaccaccattagccagcagagtgccgccattttgttctgcgtcgaaggcgatgcaacgttgtggaaaggttctcagcagttacagcttaaaccgggtgaatcagcgtttattgccgccaacgaatcaccggtgactgtcaaaggccacggccgtttagcgcgtgtttacaacaagctgtaagagcttactgaaaaaattaacatctcttgctaagctgggagctcgatccgtcgacctgcagatcgttcaaacatttggcaataaagtttcttaagattgaatcctgttgccggtcttgcgatgattatcatataatttctgttgaattacgttaagcatgtaataattaacatgtaatgcatgacgttatttatgagatgggtttttatgattagagtcccgcaattatacatttaatacgcgatagaaaacaaaatatagcgcgcaaactaggataaattatcgcgcgcggtgtcatctatgttactagatccggaccgcctgcaggcccgggggcgcgccctaattagctaacggccaggatcgccgcgtgagcctttagcaactagctagattaattaacgcaatctgttattaagttgtctaagcgtcaatttgtttacaccacaatatatcctgccaccagccagccaacagctccccgaccggcagctcggcacaaaatcaccactcgatacaggcagcccatcagaattaattctcatgtttgacagcttatcatcgactgcacggtgcaccaatgcttctggcgtcaggcagccatcggaagctgtggtatggctgtgcaggtcgtaaatcactgcataattcgtgtcgctcaaggcgcactcccgttctggataatgttttttgcgccgacatcataacggttctggcaaatattctgaaatgagctgttgacaattaatcatccggctcgtataatgtgtggaattgtgagcggataacaatttcacacaggaaacagaccatgagggaagcgttgatcgccgaagtatcgactcaactatcagaggtagttggcgtcatcgagcgccatctcgaaccgacgttgctggccgtacatttgtacggctccgcagtggatggcggcctgaagccacacagtgatattgatttgctggttacggtgaccgtaaggcttgatgaaacaacgcggcgagctttgatcaacgaccttttggaaacttcggcttcccctggagagagcgagattctccgcgctgtagaagtcaccattgttgtgcacgacgacatcattccgtggcgttatccagctaagcgcgaactgcaatttggagaatggcagcgcaatgacattcttgcaggtatcttcgagccagccacgatcgacattgatctggctatcttgctgacaaaagcaagagaacatagcgttgccttggtaggtccagcggcggaggaactctttgatccggttcctgaacaggatctatttgaggcgctaaatgaaaccttaacgctatggaactcgccgcccgactgggctggcgatgagcgaaatgtagtgcttacgttgtcccgcatttggtacagcgcagtaaccggcaaaatcgcgccgaaggatgtcgctgccgactgggcaatggagcgcctgccggcccagtatcagcccgtcatacttgaagctaggcaggcttatcttggacaagaagatcgcttggcctcgcgcgcagatcagttggaagaatttgttcactacgtgaaaggcgagatcaccaaagtagtcggcaaataaagctctagtggatctccgtacccagggatctggctcgcggcggacgcacgacgccggggcgagaccataggcgatctcctaaatcaatagtagctgtaacctcgaagcgtttcacttgtaacaacgattgagaatttttgtcataaaattgaaatacttggttcgcatttttgtcatccgcggtcagccgcaattctgacgaactgcccatttagctggagatgattgtacatccttcacgtgaaaatttctcaagcgctgtgaacaagggttcagattttagattgaaaggtgagccgttgaaacacgttcttcttgtcgatgacgacgtcgctatgcggcatcttattattgaataccttacgatccacgccttcaaagtgaccgcggtagccgacagcacccagttcacaagagtactctcttccgcgacggtcgatgtcgtggttgttgatctagatttaggtcgtgaagatgggctcgagatcgttcgtaatctggcggcaaagtctgatattccaatcataattatcagtggcgaccgccttgaggagacggataaagttgttgcactcgagctaggagcaagtgattttatcgctaagccgttcagtatcagagagtttctagcacgcattcgggttgccttgcgcgtgcgccccaacgttgtccgctccaaagaccgacggtctttttgttttactgactggacacttaatctcaggcaacgtcgcttgatgtccgaagctggcggtgaggtgaaacttacggcaggtgagttcaatcttctcctcgcgtttttagagaaaccccgcgacgttctatcgcgcgagcaacttctcattgccagtcgagtacgcgacgaggaggtttatgacaggagtatagatgttctcattttgaggctgcgccgcaaacttgaggcagatccgtcaagccctcaactgataaaaacagcaagaggtgccggttatttctttgacgcggacgtgcaggtttcgcacggggggacgatggcagcctgagccaattcccagatccccgaggaatcggcgtgagcggtcgcaaaccatccggcccggtacaaatcggcgcggcgctgggtgatgacctggtggagaagttgaaggccgcgcaggccgcccagcggcaacgcatcgaggcagaagcacgccccggtgaatcgtggcaagcggccgctgatcgaatccgcaaagaatcccggcaaccgccggcagccggtgcgccgtcgattaggaagccgcccaagggcgacgagcaaccagattttttcgttccgatgctctatgacgtgggcacccgcgatagtcgcagcatcatggacgtggccgttttccgtctgtcgaagcgtgaccgacgagctggcgaggtgatccgctacgagcttccagacgggcacgtagaggtttccgcagggccggccggcatggccagtgtgtgggattacgacctggtactgatggcggtttcccatctaaccgaatccatgaaccgataccgggaagggaagggagacaagcccggccgcgtgttccgtccacacgttgcggacgtactcaagttctgccggcgagccgatggcggaaagcagaaagacgacctggtagaaacctgcattcggttaaacaccacgcacgttgccatgcagcgtacgaagaaggccaagaacggccgcctggtgacggtatccgagggtgaagccttgattagccgctacaagatcgtaaagagcgaaaccgggcggccggagtacatcgagatcgagctggctgattggatgtaccgcgagatcacagaaggcaagaacccggacgtgctgacggttcaccccgattactttttgatcgatcccggcatcggccgttttctctaccgcctggcacgccgcgccgcaggcaaggcagaagccagatggttgttcaagacgatctacgaacgcagtggcagcgccggagagttcaagaagttctgtttcaccgtgcgcaagctgatcgggtcaaatgacctgccggagtacgatttgaaggaggaggcggggcaggctggcccgatcctagtcatgcgctaccgcaacctgatcgagggcgaagcatccgccggttcctaatgtacggagcagatgctagggcaaattgccctagcaggggaaaaaggtcgaaaaggtctctttcctgtggatagcacgtacattgggaacccaaagccgtacattgggaaccggaacccgtacattgggaacccaaagccgtacattgggaaccggtcacacatgtaagtgactgatataaaagagaaaaaaggcgatttttccgcctaaaactctttaaaacttattaaaactcttaaaacccgcctggcctgtgcataactgtctggccagcgcacagccgaagagctgcaaaaagcgcctacccttcggtcgctgcgctccctacgccccgccgcttcgcgtcggcctatcgcggccgctggccgctcaaaaatggctggcctacggccaggcaatctaccagggcgcggacaagccgcgccgtcgccactcgaccgccggcgctgaggtctgcctcgtgaagaaggtgttgctgactcataccaggcctgaatcgccccatcatccagccagaaagtgagggagccacggttgatgagagctttgttgtaggtggaccagttggtgattttgaacttttgctttgccacggaacggtctgcgttgtcgggaagatgcgtgatctgatccttcaactcagcaaaagttcgatttattcaacaaagccgccgtcccgtcaagtcagcgtaatgctctgccagtgttacaaccaattaaccaattctgattagaaaaactcatcgagcatcaaatgaaactgcaatttattcatatcaggattatcaataccatatttttgaaaaagccgtttctgtaatgaaggagaaaactcaccgaggcagttccataggatggcaagatcctggtatcggtctgcgattccgactcgtccaacatcaatacaacctattaatttcccctcgtcaaaaataaggttatcaagtgagaaatcaccatgagtgacgactgaatccggtgagaatggcaaaagctctgcattaatgaatcggccaacgcgcggggagaggcggtttgcgtattgggcgctcttccgcttcctcgctcactgactcgctgcgctcggtcgttcggctgcggcgagcggtatcagctcactcaaaggcggtaatacggttatccacagaatcaggggataacgcaggaaagaacatgtgagcaaaaggccagcaaaaggccaggaaccgtaaaaaggccgcgttgctggcgtttttccataggctccgcccccctgacgagcatcacaaaaatcgacgctcaagtcagaggtggcgaaacccgacaggactataaagataccaggcgtttccccctggaagctccctcgtgcgctctcctgttccgaccctgccgcttaccggatacctgtccgcctttctcccttcgggaagcgtggcgctttctcatagctcacgctgtaggtatctcagttcggtgtaggtcgttcgctccaagctgggctgtgtgcacgaaccccccgttcagcccgaccgctgcgccttatccggtaactatcgtcttgagtccaacccggtaagacacgacttatcgccactggcagcagccactggtaacaggattagcagagcgaggtatgtaggcggtgctacagagttcttgaagtggtggcctaactacggctacactagaagaacagtatttggtatctgcgctctgctgaagccagttaccttcggaaaaagagttggtagctcttgatccggcaaacaaaccaccgctggtagcggtggtttttttgtttgcaagcagcagattacgcgcagaaaaaaaggatctcaagaagatcctttgatcttttctacggggtctgacgctcagtggaacgaaaactcacgttaagggattttggtcatgagattatcaaaaaggatcttcacctagatccttttgatccggaatta

SEQ ID NO: 118 - DNA, 17504 bp, synthetic construct
  source 1..17504: mol_type = other DNA
attcctgtggttggcatgcacatacaaatggacgaacggataaaccttttcacgcccttttaaatatccgattattctaataaacgctcttttctcttaggtttacccgccaatatatcctgtcaaacactgatagtttaaactggcactagcctaacggtgttgactaactaggccgcttccctaattagctaacccgggggcgcgccgggaccggaattcattatgtggtctaggtaggttctatatataagaaaacttgaaatgttctaaaaaaaaattcaagcccatgcatgattgaagcaaacggtatagcaacggtgttaacctgatctagtgatctcttgcaatccttaacggccacctaccgcaggtagcaaacggcgtccccctcctcgatatctccgcggcgacctctggctttttccgcggaattgcgcggtggggacggattccacgagaccgcgacgcaaccgcctctcgccgctgggccccacaccgctcggtgccgtagcctcacgggactctttctccctcctcccccgttataaattggcttcatcccctccttgcctcatccatccaaatcccagtccccaatcccatcccttcgtaggagaaattcatcgaagctaagcgaatcctcgcgatcctctcaaggtactgcgagttttcgatccccctctcgacccctcgtatgtttgtgtttgtcgtagcgtttgattaggtatgctttccctgtttgtgttcgtcgtagcgtttgattaggtatgctttccctgttcgtgttcatcgtagtgtttgattaggtcgtgtgaggcgatggcctgctcgcgtccttcgatctgtagtcgatttgcgggtcgtggtgtagatctgcgggctgtgatgaagttatttggtgtgatctgctcgcctgattctgcgggttggctcgagtagatatgatggttggaccggttggttcgtttaccgcgctagggttgggctgggatgatgttgcatgcgccgttgcgcgtgatcccgcagcaggacttgcgtttgattgccagatctcgttacgattatgtgatttggtttggactttttagatctgtagcttctgcttatgtgccagatgcgcctactgctcatatgcctgatgataatcataaatggctgtggaactaactagttgattgcggagtcatgtatcagctacaggtgtagggactagctacaggtgtagggacttgcgtctaattgtttggtcctttactcatgttgcaattatgcaatttagtttagattgtttgttccactcatctaggctgtaaaagggacactgcttagattgctgtttaatctttttagtagattatattatattggtaacttattacccctattacatgccatacgtgacttctgctcatgcctgatgataatcatagatcactgtggaattaattagttgattgttgaatcatgtttcatgtacataccacggcacaattgcttagttccttaacaaatgcaaattttactgatccatgtatgatttgcgtggttctctaatgtgaaatactatagctacttgttagtaagaatcaggttcgtatgcttaatgctgtatgtgccttctgctcatgcctgatgataatcatatatcactggaattaattagttgatcgtttaatcatatatcaagtacataccatgccacaatttttagtcacttaacccatgcagattgaactggtccctgcatgttttgctaaattgttctattctgattagaccatatatcatgtatttttttttggtaatggttctcttattttaaatgctatatagttctggtacttgttagaaagatctgcttcatagtttagttgcctatccctcgaattaggatgctgagcagctgatcctatagctttgtttcatgtatcaattcttttgtgttcaacagtcagtttttgttagattcattgtaacttatggtcgcttactcttctggtcctcaatgcttgcagggatcccctaaatagaccatgccgaagaagaagcgcaaggtcgggggcgggggctcaggcgggggcgggagcggcggcgggggctctgggggcggcggcagcggcgggggcggcagcgggggcggcgggtcgatgctgttccaggatttcactcatctgtaccctctctcaaagactgttcggttcgagctcaagcctattgggcggactctggagcacatccacgcgaagaacttcctcagccaggacgaaaccatggccgacatgtaccagaaggtcaaggtcatcctcgacgactaccacagggacttcatcgcggacatgatgggcgaggtgaagctgacgaagctcgccgagttctacgacgtctacctcaagttccgcaagaacccgaaggacgacggcctccagaagcagctcaaggacctgcaggccgtcctgaggaaggagtccgtcaagcccatcggcagcggcggcaagtacaagaccggctacgacaggctgttcggcgccaagctgttcaaggacggcaaggagctcggcgacctggcgaagttcgtgatcgcgcaggagggcgagagctcccccaagctggcccacctggcccacttcgagaagttcagcacgtacttcaccggcttccacaggaacaggaagaacatgtacagcgacgaggacaagcacacggccatcgcctaccgcctcatccacgagaacctgccccgcttcatcgacaacctgcagatcctgacgaccatcaagcagaagcactccgccctgtacgaccagatcatcaacgagctcaccgcgagcggcctcgacgtgtccctcgccagccacctcgacggctaccacaagctcctgacccaggagggcatcaccgcctacaaccgcatcatcggcgaggtgaacggctacaccaacaagcacaaccagatctgccacaagtccgagaggatcgccaagctcaggcccctgcacaagcagatcctcagcgacggcatgggcgtgagcttcctcccgtccaagttcgccgacgactccgagatgtgccaggccgtgaacgagttctacaggcactacaccgacgtgttcgccaaggtgcagtccctgttcgacggcttcgacgaccaccagaaggacggcatctacgtggagcacaagaacctgaacgagctgtccaagcaggccttcggcgacttcgccctcctgggccgcgtgctggacggctactacgtggacgtcgtgaacccggagttcaacgagcgcttcgcgaaggcgaagacggacaacgcgaaggccaagctcaccaaggagaaggacaagttcatcaagggcgtccacagcctcgcgtccctggagcaggcgatcgagcaccacaccgcgcgccacgacgacgagtccgtgcaggccggcaagctcggccagtacttcaagcacggcctggccggcgtcgacaacccgatccagaagatccacaacaaccactccaccatcaagggcttcctggagagggagcgcccggcgggcgagcgcgcgctccccaagatcaagtccggcaagaaccccgagatgacgcagctcaggcagctgaaggagctgctcgacaacgcgctcaacgtggcgcacttcgccaagctgctcacgaccaagaccacgctggacaaccaggacggcaacttctacggcgagttcggcgtcctgtacgacgagctggcgaagatcccgaccctgtacaacaaggtccgcgactacctgagccagaagcccttctccaccgagaagtacaagctcaacttcggcaacccgaccctcctgaacggctgggacctcaacaaggagaaggacaacttcggcgtgatcctccagaaggacggctgctactacctcgccctgctggacaaggcgcacaagaaggtcttcgacaacgccccgaacaccggcaagaacgtgtaccagaagatggtgtacaagctgctccccggccccaacaagatgctgccgaaggtgttcttcgcgaagtccaacctcgactactacaaccccagcgccgagctcctggacaagtacgccaagggcacgcacaagaagggcgacaacttcaacctcaaggactgccacgcgctgatcgacttcttcaaggcgggcatcaacaagcaccccgagtggcagcacttcggcttcaagttcagcccgacctccagctacagggacctcagcgacttctaccgcgaggtggagccccagggctaccaggtgaagttcgtcgacatcaacgccgactacatcgacgagctcgtcgagcagggcaagctctacctgttccagatctacaacaaggacttctccccgaaggcccacggcaagccgaacctccacacgctctacttcaaggccctcttcagcgaggacaacctggccgacccgatctacaagctcaacggcgaggcgcagatcttctaccgcaaggccagcctggacatgaacgaaacgaccatccacagggccggcgaggtcctggccaacaagaacccggacaacccgaagaagaggcagttcgtctacgacatcatcaaggacaagaggtacacccaggacaagttcatgctccacgtcccgatcaccatgaacttcggcgtccagggcatgaccatcaaggagttcaacaagaaggtcaaccagagcatccagcagtacgacgaggtgaacgtcatcggcatcgaccgcggcgagaggcacctgctctacctgacggtcatcaactccaagggcgagatcctcgagcagcgcagcctgaacaccatccagcagttcgactaccagaagaagctggacaacagggagaaggagagggtggccgcccgccaggcctggggcgagatcgaaacgatcaaggagctcaagtccggctacctcagccacgtcgtgcaccagatcaaccagctcatgctgaagtacaacgcgatcgtggtcctcgaggacctgaacttcggcttcaagaggggccgcttcaaggtggagaagcagatctaccagaacttcgagaacgccctgatcaagaagctcaaccacctggtcctcaaggacaaggcggacgacgagatcggcagctacaagaacgcgctccagctgaccaacaacttcacggacctcaagtccatcggcaagcagacgggcttcctgttctacgtgccggcgtggaacacctccaagatcgacccggaaaccggcttcgtcgacctgctcaagccgcgctacgagaacatcgcgcagtcccaggcgttcttcggcaagttcgacaagatctgctacaacaccgacaagggctacttcgagttccacatcgactacgcgaagttcaccgacaaggccaagaactccaggcagaagtgggccatctgcagccacggcgacaagcgctacgtgtacgacaagacggcgaaccagaacaagggcgcggccaagggcatcaacgtgaacgacgagctgaagtccctcttcgcgcgctaccacatcaacgacaagcagccgaacctcgtcatggacatctgccagaacaacgacaaggagttccacaagagcctgatgtgcctgctcaagaccctgctcgccctccgctactccaacgcgagctccgacgaggacttcatcctcagccccgtcgcgaacgacgagggcgtgttcttcaactccgccctcgcggacgacacgcagccgcagaacgccgacgcgaacggcgcctaccacatcgccctcaagggcctgtggctgctcaacgagctcaagaactccgacgacctgaacaaggtgaagctcgccattgacaaccagacgtggctgaatttcgctcagaatagggggggcgggggctcaggcgggggcgggagcggcggcgggggctctgggggcggcggcagcggcgggggcggcagcgggggcggcgggtcgccgaagaagaagcgcaaggtgtccggcggcagctccggcggcagcccgaagaagaagcgcaaagtgtgagggacccgatcgttcaaacatttggcaataaagtttcttaagattgaatcctgttgccggtcttgcgatgattatcatataatttctgttgaattacgttaagcatgtaataattaacatgtaatgcatgacgttatttatgagatgggtttttatgattagagtcccgcaattatacatttaatacgcgatagaaaacaaaatatagcgcgcaaactaggataaattatcgcgcgcggtgtcatctatgttactagatcggtaccgaattcattatgtggtctaggtaggttctatatataagaaaacttgaaatgttctaaaaaaaaattcaagcccatgcatgattgaagcaaacggtatagcaacggtgttaacctgatctagtgatctcttgcaatccttaacggccacctaccgcaggtagcaaacggcgtccccctcctcgatatctccgcggcgacctctggctttttccgcggaattgcgcggtggggacggattccacgagaccgcgacgcaaccgcctctcgccgctgggccccacaccgctcggtgccgtagcctcacgggactctttctccctcctcccccgttataaattggcttcatcccctccttgcctcatccatccaaatcccagtccccaatcccatcccttcgtaggagaaattcatcgaagctaagcgaatcctcgcgatcctctcaaggtactgcgagttttcgatccccctctcgacccctcgtatgtttgtgtttgtcgtagcgtttgattaggtatgctttccctgtttgtgttcgtcgtagcgtttgattaggtatgctttccctgttcgtgttcatcgtagtgtttgattaggtcgtgtgaggcgatggcctgctcgcgtccttcgatctgtagtcgatttgcgggtcgtggtgtagatctgcgggctgtgatgaagttatttggtgtgatctgctcgcctgattctgcgggttggctcgagtagatatgatggttggaccggttggttcgtttaccgcgctagggttgggctgggatgatgttgcatgcgccgttgcgcgtgatcccgcagcaggacttgcgtttgattgccagatctcgttacgattatgtgatttggtttggactttttagatctgtagcttctgcttatgtgccagatgcgcctactgctcatatgcctgatgataatcataaatggctgtggaactaactagttgattgcggagtcatgtatcagctacaggtgtagggactagctacaggtgtagggacttgcgtctaattgtttggtcctttactcatgttgcaattatgcaatttagtttagattgtttgttccactcatctaggctgtaaaagggacactgcttagattgctgtttaatctttttagtagattatattatattggtaacttattacccctattacatgccatacgtgacttctgctcatgcctgatgataatcatagatcactgtggaattaattagttgattgttgaatcatgtttcatgtacataccacggcacaattgcttagttccttaacaaatgcaaattttactgatccatgtatgatttgcgtggttctctaatgtgaaatactatagctacttgttagtaagaatcaggttcgtatgcttaatgctgtatgtgccttctgctcatgcctgatgataatcatatatcactggaattaattagttgatcgtttaatcatatatcaagtacataccatgccacaatttttagtcacttaacccatgcagattgaactggtccctgcatgttttgctaaattgttctattctgattagaccatatatcatgtatttttttttggtaatggttctcttattttaaatgctatatagttctggtacttgttagaaagatctgcttcatagtttagttgcctatccctcgaattaggatgctgagcagctgatcctatagctttgtttcatgtatcaattcttttgtgttcaacagtcagtttttgttagattcattgtaacttatggtcgcttactcttctggtcctcaatgcttgcagaagcttgaaattctgatgagtccgtgaggacgaaacgagtaagctcgtcaatttctactgtttgtagatgggaaagaccgaggagaagatctaatttctactgtttgtagatgcaccaaggaaggggaggagatcaatttctactgtttgtagatgtcacagatcacaaacttcaaatgaatttctactgtttgtagatacgcccagaaagcatacgcagtcggccggcatggtcccagcctcctcgctggcgccggctgggcaacatgcttcggcatggcgaatgggacgatcgttcaaacatttggcaataaagtttcttaagattgaatcctgttgccggtcttgcgatgattatcatataatttctgttgaattacgttaagcatgtaataattaacatgtaatgcatgacgttatttatgagatgggtttttatgattagagtcccgcaattatacatttaatacgcgatagaaaacaaaatatagcgcgcaaactaggataaattatcgcgcgcggtgtcatctatgttactagatccctaggctgcagtgcagcgtgacccggtcgtgcccctctctagagataatgagcattgcatgtctaagttataaaaaattaccacatattttttttgtcacacttgtttgaagtgcagtttatctatctttatacatatatttaaactttactctacgaataatataatctatagtactacaataatatcagtgttttagagaatcatataaatgaacagttagacatggtctaaaggacaattgagtattttgacaacaggactctacagttttatctttttagtgtgcatgtgttctcctttttttttgcaaatagcttcacctatataatacttcatccattttattagtacatccatttagggtttagggttaatggtttttatagactaatttttttagtacatctattttattctattttagcctctaaattaagaaaactaaaactctattttagtttttttatttaataatttagatataaaatagaataaaataaagtgactaaaaattaaacaaataccctttaagaaattaaaaaaactaaggaaacatttttcttgtttcgagtagataatgccagcctgttaaacgccgtcgacgagtctaacggacaccaaccagcgaaccagcagcgtcgcgtcgggccaagcgaagcagacggcacggcatctctgtcgctgcctctggacccctctcgagagttccgctccaccgttggacttgctccgctgtcggcatccagaaattgcgtggcggagcggcagacgtgagccggcacggcaggcggcctcctcctcctctcacggcaccggcagctacgggggattcctttcccaccgctccttcgctttcccttcctcgcccgccgtaataaatagacaccccctccacaccctctttccccaacctcgtgttgttcggagcgcacacacacacaaccagatctcccccaaatccacccgtcggcacctccgcttcaaggtacgccgctcgtcctccccccccccccctctctaccttctctagatcggcgttccggtccatggttagggcccggtagttctacttctgttcatgtttgtgttagatccgtgtttgtgttagatccgtgctgctagcgttcgtacacggatgcgacctgtacgtcagacacgttctgattgctaacttgccagtgtttctctttggggaatcctgggatggctctagccgttccgcagacgggatcgatttcatgattttttttgtttcgttgcatagggtttggtttgcccttttcctttatttcaatatatgccgtgcacttgtttgtcgggtcatcttttcatgcttttttttgtcttggttgtgatgatgtggtctggttgggcggtcgttctagatcggagtagaattctgtttcaaactacctggtggatttattaattttggatctgtatgtgtgtgccatacatattcatagttacgaattgaagatgatggatggaaatatcgatctaggataggtatacatgttgatgcgggttttactgatgcatatacagagatgctttttgttcgcttggttgtgatgatgtggtgtggttgggcggtcgttcattcgttctagatcggagtagaatactgtttcaaactacctggtgtatttattaattttggaactgtatgtgtgtgtcatacatcttcatagttacgagtttaagatggatggaaatatcgatctaggataggtatacatgttgatgtgggttttactgatgcatatacatgatggcatatgcagcatctattcatatgctctaaccttgagtacctatctattataataaacaagtatgttttataattattttgatcttgatatacttggatgatggcatatgcagcagctatatgtggatttttttagccctgccttcatacgctatttatttgcttggtactgtttcttttgtcgatgctcaccctgttgtttggtgttacttctgcagggatcaccgatcatgcaaaaactcattaactcagtgcaaaactatgcctggggcagcaaaacggcgttgactgaactttatggtatggaaaatccgtccagccagccgatggccgagctgtggatgggcgcacatccgaaaagcagttcacgagtgcagaatgccgccggagatatcgtttcactgcgtgatgtgattgagagtgataaatcgactctgctcggagaggccgttgccaaacgctttggcgaactgcctttcctgttcaaagtattatgcgcagcacagccactctccattcaggttcatccaaacaaacacaattctgaaatcggttttgccaaagaaaatgccgcaggtatcccgatggatgccgccgagcgtaactataaagatcctaaccacaagccggagctggtttttgcgctgacgcctttccttgcgatgaacgcgtttcgtgaattttccgagattgtctccctactccagccggtcgcaggtgcacatccggcgattgctcactttttacaacagcctgatgccgaacgtttaagcgaactgttcgccagcctgttgaatatgcagggtgaagaaaaatcccgcgcgctggcgattttaaaatcggccctcgatagccagcagggtgaaccgtggcaaacgattcgtttaatttctgaattttacccggaagacagcggtctgttctccccgctattgctgaatgtggtgaaattgaaccctggcgaagcgatgttcctgttcgctgaaacaccgcacgcttacctgcaaggcgtggcgctggaagtgatggcaaactccgataacgtgctgcgtgcgggtctgacgcctaaatacattgatattccggaactggttgccaatgtgaaattcgaagccaaaccggctaaccagttgttgacccagccggtgaaacaaggtgcagaactggacttcccgattccagtggatgattttgccttctcgctgcatgaccttagtgataaagaaaccaccattagccagcagagtgccgccattttgttctgcgtcgaaggcgatgcaacgttgtggaaaggttctcagcagttacagcttaaaccgggtgaatcagcgtttattgccgccaacgaatcaccggtgactgtcaaaggccacggccgtttagcgcgtgtttacaacaagctgtaagagcttactgaaaaaattaacatctcttgctaagctgggagctcgatccgtcgacctgcagatcgttcaaacatttggcaataaagtttcttaagattgaatcctgttgccggtcttgcgatgattatcatataatttctgttgaattacgttaagcatgtaataattaacatgtaatgcatgacgttatttatgagatgggtttttatgattagagtcccgcaattatacatttaatacgcgatagaaaacaaaatatagcgcgcaaactaggataaattatcgcgcgcggtgtcatctatgttactagatccggaccgcctgcaggcccgggggcgcgccctaattagctaacggccaggatcgccgcgtgagcctttagcaactagctagattaattaacgcaatctgttattaagttgtctaagcgtcaatttgtttacaccacaatatatcctgccaccagccagccaacagctccccgaccggcagctcggcacaaaatcaccactcgatacaggcagcccatcagaattaattctcatgtttgacagcttatcatcgactgcacggtgcaccaatgcttctggcgtcaggcagccatcggaagctgtggtatggctgtgcaggtcgtaaatcactgcataattcgtgtcgctcaaggcgcactcccgttctggataatgttttttgcgccgacatcataacggttctggcaaatattctgaaatgagctgttgacaattaatcatccggctcgtataatgtgtggaattgtgagcggataacaatttcacacaggaaacagaccatgagggaagcgttgatcgccgaagtatcgactcaactatcagaggtagttggcgtcatcgagcgccatctcgaaccgacgttgctggccgtacatttgtacggctccgcagtggatggcggcctgaagccacacagtgatattgatttgctggttacggtgaccgtaaggcttgatgaaacaacgcggcgagctttgatcaacgaccttttggaaacttcggcttcccctggagagagcgagattctccgcgctgtagaagtcaccattgttgtgcacgacgacatcattccgtggcgttatccagctaagcgcgaactgcaatttggagaatggcagcgcaatgacattcttgcaggtatcttcgagccagccacgatcgacattgatctggctatcttgctgacaaaagcaagagaacatagcgttgccttggtaggtccagcggcggaggaactctttgatccggttcctgaacaggatctatttgaggcgctaaatgaaaccttaacgctatggaactcgccgcccgactgggctggcgatgagcgaaatgtagtgcttacgttgtcccgcatttggtacagcgcagtaaccggcaaaatcgcgccgaaggatgtcgctgccgactgggcaatggagcgcctgccggcccagtatcagcccgtcatacttgaagctaggcaggcttatcttggacaagaagatcgcttggcctcgcgcgcagatcagttggaagaatttgttcactacgtgaaaggcgagatcaccaaagtagtcggcaaataaagctctagtggatctccgtacccagggatctggctcgcggcggacgcacgacgccggggcgagaccataggcgatctcctaaatcaatagtagctgtaacctcgaagcgtttcacttgtaacaacgattgagaatttttgtcataaaattgaaatacttggttcgcatttttgtcatccgcggtcagccgcaattctgacgaactgcccatttagctggagatgattgtacatccttcacgtgaaaatttctcaagcgctgtgaacaagggttcagattttagattgaaaggtgagccgttgaaacacgttcttcttgtcgatgacgacgtcgctatgcggcatcttattattgaataccttacgatccacgccttcaaagtgaccgcggtagccgacagcacccagttcacaagagtactctcttccgcgacggtcgatgtcgtggttgttgatctagatttaggtcgtgaagatgggctcgagatcgttcgtaatctggcggcaaagtctgatattccaatcataattatcagtggcgaccgccttgaggagacggataaagttgttgcactcgagctaggagcaagtgattttatcgctaagccgttcagtatcagagagtttctagcacgcattcgggttgccttgcgcgtgcgccccaacgttgtccgctccaaagaccgacggtctttttgttttactgactggacacttaatctcaggcaacgtcgcttgatgtccgaagctggcggtgaggtgaaacttacggcaggtgagttcaatcttctcctcgcgtttttagagaaaccccgcgacgttctatcgcgcgagcaacttctcattgccagtcgagtacgcgacgaggaggtttatgacaggagtatagatgttctcattttgaggctgcgccgcaaacttgaggcagatccgtcaagccctcaactgataaaaacagcaagaggtgccggttatttctttgacgcggacgtgcaggtttcgcacggggggacgatggcagcctgagccaattcccagatccccgaggaatcggcgtgagcggtcgcaaaccatccggcccggtacaaatcggcgcggcgctgggtgatgacctggtggagaagttgaaggccgcgcaggccgcccagcggcaacgcatcgaggcagaagcacgccccggtgaatcgtggcaagcggccgctgatcgaatccgcaaagaatcccggcaaccgccggcagccggtgcgccgtcgattaggaagccgcccaagggcgacgagcaaccagattttttcgttccgatgctctatgacgtgggcacccgcgatagtcgcagcatcatggacgtggccgttttccgtctgtcgaagcgtgaccgacgagctggcgaggtgatccgctacgagcttccagacgggcacgtagaggtttccgcagggccggccggcatggccagtgtgtgggattacgacctggtactgatggcggtttcccatctaaccgaatccatgaaccgataccgggaagggaagggagacaagcccggccgcgtgttccgtccacacgttgcggacgtactcaagttctgccggcgagccgatggcggaaagcagaaagacgacctggtagaaacctgcattcggttaaacaccacgcacgttgccatgcagcgtacgaagaaggccaagaacggccgcctggtgacggtatccgagggtgaagccttgattagccgctacaagatcgtaaagagcgaaaccgggcggccggagtacatcgagatcgagctggctgattggatgtaccgcgagatcacagaaggcaagaacccggacgtgctgacggttcaccccgattactttttgatcgatcccggcatcggccgttttctctaccgcctggcacgccgcgccgcaggcaaggcagaagccagatggttgttcaagacgatctacgaacgcagtggcagcgccggagagttcaagaagttctgtttcaccgtgcgcaagctgatcgggtcaaatgacctgccggagtacgatttgaaggaggaggcggggcaggctggcccgatcctagtcatgcgctaccgcaacctgatcgagggcgaagcatccgccggttcctaatgtacggagcagatgctagggcaaattgccctagcaggggaaaaaggtcgaaaaggtctctttcctgtggatagcacgtacattgggaacccaaagccgtacattgggaaccggaacccgtacattgggaacccaaagccgtacattgggaaccggtcacacatgtaagtgactgatataaaagagaaaaaaggcgatttttccgcctaaaactctttaaaacttattaaaactcttaaaacccgcctggcctgtgcataactgtctggccagcgcacagccgaagagctgcaaaaagcgcctacccttcggtcgctgcgctccctacgccccgccgcttcgcgtcggcctatcgcggccgctggccgctcaaaaatggctggcctacggccaggcaatctaccagggcgcggacaagccgcgccgtcgccactcgaccgccggcgctgaggtctgcctcgtgaagaaggtgttgctgactcataccaggcctgaatcgccccatcatccagccagaaagtgagggagccacggttgatgagagctttgttgtaggtggaccagttggtgattttgaacttttgctttgccacggaacggtctgcgttgtcgggaagatgcgtgatctgatccttcaactcagcaaaagttcgatttattcaacaaagccgccgtcccgtcaagtcagcgtaatgctctgccagtgttacaaccaattaaccaattctgattagaaaaactcatcgagcatcaaatgaaactgcaatttattcatatcaggattatcaataccatatttttgaaaaagccgtttctgtaatgaaggagaaaactcaccgaggcagttccataggatggcaagatcctggtatcggtctgcgattccgactcgtccaacatcaatacaacctattaatttcccctcgtcaaaaataaggttatcaagtgagaaatcaccatgagtgacgactgaatccggtgagaatggcaaaagctctgcattaatgaatcggccaacgcgcggggagaggcggtttgcgtattgggcgctcttccgcttcctcgctcactgactcgctgcgctcggtcgttcggctgcggcgagcggtatcagctcactcaaaggcggtaatacggttatccacagaatcaggggataacgcaggaaagaacatgtgagcaaaaggccagcaaaaggccaggaaccgtaaaaaggccgcgttgctggcgtttttccataggctccgcccccctgacgagcatcacaaaaatcgacgctcaagtcagaggtggcgaaacccgacaggactataaagataccaggcgtttccccctggaagctccctcgtgcgctctcctgttccgaccctgccgcttaccggatacctgtccgcctttctcccttcgggaagcgtggcgctttctcatagctcacgctgtaggtatctcagttcggtgtaggtcgttcgctccaagctgggctgtgtgcacgaaccccccgttcagcccgaccgctgcgccttatccggtaactatcgtcttgagtccaacccggtaagacacgacttatcgccactggcagcagccactggtaacaggattagcagagcgaggtatgtaggcggtgctacagagttcttgaagtggtggcctaactacggctacactagaagaacagtatttggtatctgcgctctgctgaagccagttaccttcggaaaaagagttggtagctcttgatccggcaaacaaaccaccgctggtagcggtggtttttttgtttgcaagcagcagattacgcgcagaaaaaaaggatctcaagaagatcctttgatcttttctacggggtctgacgctcagtggaacgaaaactcacgttaagggattttggtcatgagattatcaaaaaggatcttcacctagatccttttgatccggaatta

SEQ ID NO: 119 - DNA, 17504 bp, synthetic construct
  source 1..17504: mol_type = other DNA
attcctgtggttggcatgcacatacaaatggacgaacggataaaccttttcacgcccttttaaatatccgattattctaataaacgctcttttctcttaggtttacccgccaatatatcctgtcaaacactgatagtttaaactggcactagcctaacggtgttgactaactaggccgcttccctaattagctaacccgggggcgcgccgggaccggaattcattatgtggtctaggtaggttctatatataagaaaacttgaaatgttctaaaaaaaaattcaagcccatgcatgattgaagcaaacggtatagcaacggtgttaacctgatctagtgatctcttgcaatccttaacggccacctaccgcaggtagcaaacggcgtccccctcctcgatatctccgcggcgacctctggctttttccgcggaattgcgcggtggggacggattccacgagaccgcgacgcaaccgcctctcgccgctgggccccacaccgctcggtgccgtagcctcacgggactctttctccctcctcccccgttataaattggcttcatcccctccttgcctcatccatccaaatcccagtccccaatcccatcccttcgtaggagaaattcatcgaagctaagcgaatcctcgcgatcctctcaaggtactgcgagttttcgatccccctctcgacccctcgtatgtttgtgtttgtcgtagcgtttgattaggtatgctttccctgtttgtgttcgtcgtagcgtttgattaggtatgctttccctgttcgtgttcatcgtagtgtttgattaggtcgtgtgaggcgatggcctgctcgcgtccttcgatctgtagtcgatttgcgggtcgtggtgtagatctgcgggctgtgatgaagttatttggtgtgatctgctcgcctgattctgcgggttggctcgagtagatatgatggttggaccggttggttcgtttaccgcgctagggttgggctgggatgatgttgcatgcgccgttgcgcgtgatcccgcagcaggacttgcgtttgattgccagatctcgttacgattatgtgatttggtttggactttttagatctgtagcttctgcttatgtgccagatgcgcctactgctcatatgcctgatgataatcataaatggctgtggaactaactagttgattgcggagtcatgtatcagctacaggtgtagggactagctacaggtgtagggacttgcgtctaattgtttggtcctttactcatgttgcaattatgcaatttagtttagattgtttgttccactcatctaggctgtaaaagggacactgcttagattgctgtttaatctttttagtagattatattatattggtaacttattacccctattacatgccatacgtgacttctgctcatgcctgatgataatcatagatcactgtggaattaattagttgattgttgaatcatgtttcatgtacataccacggcacaattgcttagttccttaacaaatgcaaattttactgatccatgtatgatttgcgtggttctctaatgtgaaatactatagctacttgttagtaagaatcaggttcgtatgcttaatgctgtatgtgccttctgctcatgcctgatgataatcatatatcactggaattaattagttgatcgtttaatcatatatcaagtacataccatgccacaatttttagtcacttaacccatgcagattgaactggtccctgcatgttttgctaaattgttctattctgattagaccatatatcatgtatttttttttggtaatggttctcttattttaaatgctatatagttctggtacttgttagaaagatctgcttcatagtttagttgcctatccctcgaattaggatgctgagcagctgatcctatagctttgtttcatgtatcaattcttttgtgttcaacagtcagtttttgttagattcattgtaacttatggtcgcttactcttctggtcctcaatgcttgcagggatcccctaaatagaccatgccgaagaagaagcgcaaggtcgggggcgggggctcaggcgggggcgggagcggcggcgggggctctgggggcggcggcagcggcgggggcggcagcgggggcggcgggtcgatgctgttccaggatttcactcatctgtaccctctctcaaagactgttcggttcgagctcaagcctattgggcggactctggagcacatccacgcgaagaacttcctcagccaggacgaaaccatggccgacatgtaccagaaggtcaaggtcatcctcgacgactaccacagggacttcatcgcggacatgatgggcgaggtgaagctgacgaagctcgccgagttctacgacgtctacctcaagttccgcaagaacccgaaggacgacggcctccagaagcagctcaaggacctgcaggccgtcctgaggaaggagtccgtcaagcccatcggcagcggcggcaagtacaagaccggctacgacaggctgttcggcgccaagctgttcaaggacggcaaggagctcggcgacctggcgaagttcgtgatcgcgcaggagggcgagagctcccccaagctggcccacctggcccacttcgagaagttcagcacgtacttcaccggcttccacgacaacaggaagaacatgtacagcgacgaggacaagcacacggccatcgcctaccgcctcatccacgagaacctgccccgcttcatcgacaacctgcagatcctgacgaccatcaagcagaagcactccgccctgtacgaccagatcatcaacgagctcaccgcgagcggcctcgacgtgtccctcgccagccacctcgacggctaccacaagctcctgacccaggagggcatcaccgcctacaaccgcatcatcggcgaggtgaacggctacaccaacaagcacaaccagatctgccacaagtccgagaggatcgccaagctcaggcccctgcacaagcagatcctcagcgacggcatgggcgtgagcttcctcccgtccaagttcgccgacgactccgagatgtgccaggccgtgaacgagttctacaggcactacaccgacgtgttcgccaaggtgcagtccctgttcgacggcttcgacgaccaccagaaggacggcatctacgtggagcacaagaacctgaacgagctgtccaagcaggccttcggcgactgggccctcctgggccgcgtgctggacggctactacgtggacgtcgtgaacccggagttcaacgagcgcttcgcgaaggcgaagacggacaacgcgaaggccaagctcaccaaggagaaggacaagttcatcaagggcgtccacagcctcgcgtccctggagcaggcgatcgagcaccacaccgcgcgccacgacgacgagtccgtgcaggccggcaagctcggccagtacttcaagcacggcctggccggcgtcgacaacccgatccagaagatccacaacaaccactccaccatcaagggcttcctggagagggagcgcccggcgggcgagcgcgcgctccccaagatcaagtccggcaagaaccccgagatgacgcagctcaggcagctgaaggagctgctcgacaacgcgctcaacgtggcgcacttcgccaagctgctcacgaccaagaccacgctggacaaccaggacggcaacttctacggcgagttcggcgtcctgtacgacgagctggcgaagatcccgaccctgtacaacaaggtccgcgactacctgagccagaagcccttctccaccgagaagtacaagctcaacttcggcaacccgaccctcctgaacggctgggacctcaacaaggagaaggacaacttcggcgtgatcctccagaaggacggctgctactacctcgccctgctggacaaggcgcacaagaaggtcttcgacaacgccccgaacaccggcaagaacgtgtaccagaagatggtgtacaagctgctccccggccccaacaagatgctgccgaaggtgttcttcgcgaagtccaacctcgactactacaaccccagcgccgagctcctggacaagtacgccaagggcacgcacaagaagggcgacaacttcaacctcaaggactgccacgcgctgatcgacttcttcaaggcgggcatcaacaagcaccccgagtggcagcacttcggcttcaagttcagcccgacctccagctacagggacctcagcgacttctaccgcgaggtggagccccagggctaccaggtgaagttcgtcgacatcaacgccgactacatcgacgagctcgtcgagcagggcaagctctacctgttccagatctacaacaaggacttctccccgaaggcccacggcaagccgaacctccacacgctctacttcaaggccctcttcagcgaggacaacctggccgacccgatctacaagctcaacggcgaggcgcagatcttctaccgcaaggccagcctggacatgaacgaaacgaccatccacagggccggcgaggtcctggccaacaagaacccggacaacccgaagaagaggcagttcgtctacgacatcatcaaggacaagaggtacacccaggacaagttcatgctccacgtcccgatcaccatgaacttcggcgtccagggcatgaccatcaaggagttcaacaagaaggtcaaccagagcatccagcagtacgacgaggtgaacgtcatcggcatcgaccgcggcgagaggcacctgctctacctgacggtcatcaactccaagggcgagatcctcgagcagcgcagcctgaacaccatccagcagttcgactaccagaagaagctggacaacagggagaaggagagggtggccgcccgccaggcctggggcgagatcgaaacgatcaaggagctcaagtccggctacctcagccacgtcgtgcaccagatcaaccagctcatgctgaagtacaacgcgatcgtggtcctcgaggacctgaacttcggcttcaagaggggccgcttcaaggtggagaagcagatctaccagaacttcgagaacgccctgatcaagaagctcaaccacctggtcctcaaggacaaggcggacgacgagatcggcagctacaagaacgcgctccagctgaccaacaacttcacggacctcaagtccatcggcaagcagacgggcttcctgttctacgtgccggcgtggaacacctccaagatcgacccggaaaccggcttcgtcgacctgctcaagccgcgctacgagaacatcgcgcagtcccaggcgttcttcggcaagttcgacaagatctgctacaacaccgacaagggctacttcgagttccacatcgactacgcgaagttcaccgacaaggccaagaactccaggcagaagtgggccatctgcagccacggcgacaagcgctacgtgtacgacaagacggcgaaccagaacaagggcgcggccaagggcatcaacgtgaacgacgagctgaagtccctcttcgcgcgctaccacatcaacgacaagcagccgaacctcgtcatggacatctgccagaacaacgacaaggagttccacaagagcctgatgtgcctgctcaagaccctgctcgccctccgctactccaacgcgagctccgacgaggacttcatcctcagccccgtcgcgaacgacgagggcgtgttcttcaactccgccctcgcggacgacacgcagccgcagaacgccgacgcgaacggcgcctaccacatcgccctcaagggcctgtggctgctcaacgagctcaagaactccgacgacctgaacaaggtgaagctcgccattgacaaccagacgtggctgaatttcgctcagaatagggggggcgggggctcaggcgggggcgggagcggcggcgggggctctgggggcggcggcagcggcgggggcggcagcgggggcggcgggtcgccgaagaagaagcgcaaggtgtccggcggcagctccggcggcagcccgaagaagaagcgcaaagtgtgagggacccgatcgttcaaacatttggcaataaagtttcttaagattgaatcctgttgccggtcttgcgatgattatcatataatttctgttgaattacgttaagcatgtaataattaacatgtaatgcatgacgttatttatgagatgggtttttatgattagagtcccgcaattatacatttaatacgcgatagaaaacaaaatatagcgcgcaaactaggataaattatcgcgcgcggtgtcatctatgttactagatcggtaccgaattcattatgtggtctaggtaggttctatatataagaaaacttgaaatgttctaaaaaaaaattcaagcccatgcatgattgaagcaaacggtatagcaacggtgttaacctgatctagtgatctcttgcaatccttaacggccacctaccgcaggtagcaaacggcgtccccctcctcgatatctccgcggcgacctctggctttttccgcggaattgcgcggtggggacggattccacgagaccgcgacgcaaccgcctctcgccgctgggccccacaccgctcggtgccgtagcctcacgggactctttctccctcctcccccgttataaattggcttcatcccctccttgcctcatccatccaaatcccagtccccaatcccatcccttcgtaggagaaattcatcgaagctaagcgaatcctcgcgatcctctcaaggtactgcgagttttcgatccccctctcgacccctcgtatgtttgtgtttgtcgtagcgtttgattaggtatgctttccctgtttgtgttcgtcgtagcgtttgattaggtatgctttccctgttcgtgttcatcgtagtgtttgattaggtcgtgtgaggcgatggcctgctcgcgtccttcgatctgtagtcgatttgcgggtcgtggtgtagatctgcgggctgtgatgaagttatttggtgtgatctgctcgcctgattctgcgggttggctcgagtagatatgatggttggaccggttggttcgtttaccgcgctagggttgggctgggatgatgttgcatgcgccgttgcgcgtgatcccgcagcaggacttgcgtttgattgccagatctcgttacgattatgtgatttggtttggactttttagatctgtagcttctgcttatgtgccagatgcgcctactgctcatatgcctgatgataatcataaatggctgtggaactaactagttgattgcggagtcatgtatcagctacaggtgtagggactagctacaggtgtagggacttgcgtctaattgtttggtcctttactcatgttgcaattatgcaatttagtttagattgtttgttccactcatctaggctgtaaaagggacactgcttagattgctgtttaatctttttagtagattatattatattggtaacttattacccctattacatgccatacgtgacttctgctcatgcctgatgataatcatagatcactgtggaattaattagttgattgttgaatcatgtttcatgtacataccacggcacaattgcttagttccttaacaaatgcaaattttactgatccatgtatgatttgcgtggttctctaatgtgaaatactatagctacttgttagtaagaatcaggttcgtatgcttaatgctgtatgtgccttctgctcatgcctgatgataatcatatatcactggaattaattagttgatcgtttaatcatatatcaagtacataccatgccacaatttttagtcacttaacccatgcagattgaactggtccctgcatgttttgctaaattgttctattctgattagaccatatatcatgtatttttttttggtaatggttctcttattttaaatgctatatagttctggtacttgttagaaagatctgcttcatagtttagttgcctatccctcgaattaggatgctgagcagctgatcctatagctttgtttcatgtatcaattcttttgtgttcaacagtcagtttttgttagattcattgtaacttatggtcgcttactcttctggtcctcaatgcttgcagaagcttgaaattctgatgagtccgtgaggacgaaacgagtaagctcgtcaatttctactgtttgtagatgggaaagaccgaggagaagatctaatttctactgtttgtagatgcaccaaggaaggggaggagatcaatttctactgtttgtagatgtcacagatcacaaacttcaaatgaatttctactgtttgtagatacgcccagaaagcatacgcagtcggccggcatggtcccagcctcctcgctggcgccggctgggcaacatgcttcggcatggcgaatgggacgatcgttcaaacatttggcaataaagtttcttaagattgaatcctgttgccggtcttgcgatgattatcatataatttctgttgaattacgttaagcatgtaataattaacatgtaatgcatgacgttatttatgagatgggtttttatgattagagtcccgcaattatacatttaatacgcgatagaaaacaaaatatagcgcgcaaactaggataaattatcgcgcgcggtgtcatctatgttactagatccctaggctgcagtgcagcgtgacccggtcgtgcccctctctagagataatgagcattgcatgtctaagttataaaaaattaccacatattttttttgtcacacttgtttgaagtgcagtttatctatctttatacatatatttaaactttactctacgaataatataatctatagtactacaataatatcagtgttttagagaatcatataaatgaacagttagacatggtctaaaggacaattgagtattttgacaacaggactctacagttttatctttttagtgtgcatgtgttctcctttttttttgcaaatagcttcacctatataatacttcatccattttattagtacatccatttagggtttagggttaatggtttttatagactaatttttttagtacatctattttattctattttagcctctaaattaagaaaactaaaactctattttagtttttttatttaataatttagatataaaatagaataaaataaagtgactaaaaattaaacaaataccctttaagaaattaaaaaaactaaggaaacatttttcttgtttcgagtagataatgccagcctgttaaacgccgtcgacgagtctaacggacaccaaccagcgaaccagcagcgtcgcgtcgggccaagcgaagcagacggcacggcatctctgtcgctgcctctggacccctctcgagagttccgctccaccgttggacttgctccgctgtcggcatccagaaattgcgtggcggagcggcagacgtgagccggcacggcaggcggcctcctcctcctctcacggcaccggcagctacgggggattcctttcccaccgctccttcgctttcccttcctcgcccgccgtaataaatagacaccccctccacaccctctttccccaacctcgtgttgttcggagcgcacacacacacaaccagatctcccccaaatccacccgtcggcacctccgcttcaaggtacgccgctcgtcctccccccccccccctctctaccttctctagatcggcgttccggtccatggttagggcccggtagttctacttctgttcatgtttgtgttagatccgtgtttgtgttagatccgtgctgctagcgttcgtacacggatgcgacctgtacgtcagacacgttctgattgctaacttgccagtgtttctctttggggaatcctgggatggctctagccgttccgcagacgggatcgatttcatgattttttttgtttcgttgcatagggtttggtttgcccttttcctttatttcaatatatgccgtgcacttgtttgtcgggtcatcttttcatgcttttttttgtcttggttgtgatgatgtggtctggttgggcggtcgttctagatcggagtagaattctgtttcaaactacctggtggatttattaattttggatctgtatgtgtgtgccatacatattcatagttacgaattgaagatgatggatggaaatatcgatctaggataggtatacatgttgatgcgggttttactgatgcatatacagagatgctttttgttcgcttggttgtgatgatgtggtgtggttgggcggtcgttcattcgttctagatcggagtagaatactgtttcaaactacctggtgtatttattaattttggaactgtatgtgtgtgtcatacatcttcatagttacgagtttaagatggatggaaatatcgatctaggataggtatacatgttgatgtgggttttactgatgcatatacatgatggcatatgcagcatctattcatatgctctaaccttgagtacctatctattataataaacaagtatgttttataattattttgatcttgatatacttggatgatggcatatgcagcagctatatgtggatttttttagccctgccttcatacgctatttatttgcttggtactgtttcttttgtcgatgctcaccctgttgtttggtgttacttctgcagggatcaccgatcatgcaaaaactcattaactcagtgcaaaactatgcctggggcagcaaaacggcgttgactgaactttatggtatggaaaatccgtccagccagccgatggccgagctgtggatgggcgcacatccgaaaagcagttcacgagtgcagaatgccgccggagatatcgtttcactgcgtgatgtgattgagagtgataaatcgactctgctcggagaggccgttgccaaacgctttggcgaactgcctttcctgttcaaagtattatgcgcagcacagccactctccattcaggttcatccaaacaaacacaattctgaaatcggttttgccaaagaaaatgccgcaggtatcccgatggatgccgccgagcgtaactataaagatcctaaccacaagccggagctggtttttgcgctgacgcctttccttgcgatgaacgcgtttcgtgaattttccgagattgtctccctactccagccggtcgcaggtgcacatccggcgattgctcactttttacaacagcctgatgccgaacgtttaagcgaactgttcgccagcctgttgaatatgcagggtgaagaaaaatcccgcgcgctggcgattttaaaatcggccctcgatagccagcagggtgaaccgtggcaaacgattcgtttaatttctgaattttacccggaagacagcggtctgttctccccgctattgctgaatgtggtgaaattgaaccctggcgaagcgatgttcctgttcgctgaaacaccgcacgcttacctgcaaggcgtggcgctggaagtgatggcaaactccgataacgtgctgcgtgcgggtctgacgcctaaatacattgatattccggaactggttgccaatgtgaaattcgaagccaaaccggctaaccagttgttgacccagccggtgaaacaaggtgcagaactggacttcccgattccagtggatgattttgccttctcgctgcatgaccttagtgataaagaaaccaccattagccagcagagtgccgccattttgttctgcgtcgaaggcgatgcaacgttgtggaaaggttctcagcagttacagcttaaaccgggtgaatcagcgtttattgccgccaacgaatcaccggtgactgtcaaaggccacggccgtttagcgcgtgtttacaacaagctgtaagagcttactgaaaaaattaacatctcttgctaagctgggagctcgatccgtcgacctgcagatcgttcaaacatttggcaataaagtttcttaagattgaatcctgttgccggtcttgcgatgattatcatataatttctgttgaattacgttaagcatgtaataattaacatgtaatgcatgacgttatttatgagatgggtttttatgattagagtcccgcaattatacatttaatacgcgatagaaaacaaaatatagcgcgcaaactaggataaattatcgcgcgcggtgtcatctatgttactagatccggaccgcctgcaggcccgggggcgcgccctaattagctaacggccaggatcgccgcgtgagcctttagcaactagctagattaattaacgcaatctgttattaagttgtctaagcgtcaatttgtttacaccacaatatatcctgccaccagccagccaacagctccccgaccggcagctcggcacaaaatcaccactcgatacaggcagcccatcagaattaattctcatgtttgacagcttatcatcgactgcacggtgcaccaatgcttctggcgtcaggcagccatcggaagctgtggtatggctgtgcaggtcgtaaatcactgcataattcgtgtcgctcaaggcgcactcccgttctggataatgttttttgcgccgacatcataacggttctggcaaatattctgaaatgagctgttgacaattaatcatccggctcgtataatgtgtggaattgtgagcggataacaatttcacacaggaaacagaccatgagggaagcgttgatcgccgaagtatcgactcaactatcagaggtagttggcgtcatcgagcgccatctcgaaccgacgttgctggccgtacatttgtacggctccgcagtggatggcggcctgaagccacacagtgatattgatttgctggttacggtgaccgtaaggcttgatgaaacaacgcggcgagctttgatcaacgaccttttggaaacttcggcttcccctggagagagcgagattctccgcgctgtagaagtcaccattgttgtgcacgacgacatcattccgtggcgttatccagctaagcgcgaactgcaatttggagaatggcagcgcaatgacattcttgcaggtatcttcgagccagccacgatcgacattgatctggctatcttgctgacaaaagcaagagaacatagcgttgccttggtaggtccagcggcggaggaactctttgatccggttcctgaacaggatctatttgaggcgctaaatgaaaccttaacgctatggaactcgccgcccgactgggctggcgatgagcgaaatgtagtgcttacgttgtcccgcatttggtacagcgcagtaaccggcaaaatcgcgccgaaggatgtcgctgccgactgggcaatggagcgcctgccggcccagtatcagcccgtcatacttgaagctaggcaggcttatcttggacaagaagatcgcttggcctcgcgcgcagatcagttggaagaatttgttcactacgtgaaaggcgagatcaccaaagtagtcggcaaataaagctctagtggatctccgtacccagggatctggctcgcggcggacgcacgacgccggggcgagaccataggcgatctcctaaatcaatagtagctgtaacctcgaagcgtttcacttgtaacaacgattgagaatttttgtcataaaattgaaatacttggttcgcatttttgtcatccgcggtcagccgcaattctgacgaactgcccatttagctggagatgattgtacatccttcacgtgaaaatttctcaagcgctgtgaacaagggttcagattttagattgaaaggtgagccgttgaaacacgttcttcttgtcgatgacgacgtcgctatgcggcatcttattattgaataccttacgatccacgccttcaaagtgaccgcggtagccgacagcacccagttcacaagagtactctcttccgcgacggtcgatgtcgtggttgttgatctagatttaggtcgtgaagatgggctcgagatcgttcgtaatctggcggcaaagtctgatattccaatcataattatcagtggcgaccgccttgaggagacggataaagttgttgcactcgagctaggagcaagtgattttatcgctaagccgttcagtatcagagagtttctagcacgcattcgggttgccttgcgcgtgcgccccaacgttgtccgctccaaagaccgacggtctttttgttttactgactggacacttaatctcaggcaacgtcgcttgatgtccgaagctggcggtgaggtgaaacttacggcaggtgagttcaatcttctcctcgcgtttttagagaaaccccgcgacgttctatcgcgcgagcaacttctcattgccagtcgagtacgcgacgaggaggtttatgacaggagtatagatgttctcattttgaggctgcgccgcaaacttgaggcagatccgtcaagccctcaactgataaaaacagcaagaggtgccggttatttctttgacgcggacgtgcaggtttcgcacggggggacgatggcagcctgagccaattcccagatccccgaggaatcggcgtgagcggtcgcaaaccatccggcccggtacaaatcggcgcggcgctgggtgatgacctggtggagaagttgaaggccgcgcaggccgcccagcggcaacgcatcgaggcagaagcacgccccggtgaatcgtggcaagcggccgctgatcgaatccgcaaagaatcccggcaaccgccggcagccggtgcgccgtcgattaggaagccgcccaagggcgacgagcaaccagattttttcgttccgatgctctatgacgtgggcacccgcgatagtcgcagcatcatggacgtggccgttttccgtctgtcgaagcgtgaccgacgagctggcgaggtgatccgctacgagcttccagacgggcacgtagaggtttccgcagggccggccggcatggccagtgtgtgggattacgacctggtactgatggcggtttcccatctaaccgaatccatgaaccgataccgggaagggaagggagacaagcccggccgcgtgttccgtccacacgttgcggacgtactcaagttctgccggcgagccgatggcggaaagcagaaagacgacctggtagaaacctgcattcggttaaacaccacgcacgttgccatgcagcgtacgaagaaggccaagaacggccgcctggtgacggtatccgagggtgaagccttgattagccgctacaagatcgtaaagagcgaaaccgggcggccggagtacatcgagatcgagctggctgattggatgtaccgcgagatcacagaaggcaagaacccggacgtgctgacggttcaccccgattactttttgatcgatcccggcatcggccgttttctctaccgcctggcacgccgcgccgcaggcaaggcagaagccagatggttgttcaagacgatctacgaacgcagtggcagcgccggagagttcaagaagttctgtttcaccgtgcgcaagctgatcgggtcaaatgacctgccggagtacgatttgaaggaggaggcggggcaggctggcccgatcctagtcatgcgctaccgcaacctgatcgagggcgaagcatccgccggttcctaatgtacggagcagatgctagggcaaattgccctagcaggggaaaaaggtcgaaaaggtctctttcctgtggatagcacgtacattgggaacccaaagccgtacattgggaaccggaacccgtacattgggaacccaaagccgtacattgggaaccggtcacacatgtaagtgactgatataaaagagaaaaaaggcgatttttccgcctaaaactctttaaaacttattaaaactcttaaaacccgcctggcctgtgcataactgtctggccagcgcacagccgaagagctgcaaaaagcgcctacccttcggtcgctgcgctccctacgccccgccgcttcgcgtcggcctatcgcggccgctggccgctcaaaaatggctggcctacggccaggcaatctaccagggcgcggacaagccgcgccgtcgccactcgaccgccggcgctgaggtctgcctcgtgaagaaggtgttgctgactcataccaggcctgaatcgccccatcatccagccagaaagtgagggagccacggttgatgagagctttgttgtaggtggaccagttggtgattttgaacttttgctttgccacggaacggtctgcgttgtcgggaagatgcgtgatctgatccttcaactcagcaaaagttcgatttattcaacaaagccgccgtcccgtcaagtcagcgtaatgctctgccagtgttacaaccaattaaccaattctgattagaaaaactcatcgagcatcaaatgaaactgcaatttattcatatcaggattatcaataccatatttttgaaaaagccgtttctgtaatgaaggagaaaactcaccgaggcagttccataggatggcaagatcctggtatcggtctgcgattccgactcgtccaacatcaatacaacctattaatttcccctcgtcaaaaataaggttatcaagtgagaaatcaccatgagtgacgactgaatccggtgagaatggcaaaagctctgcattaatgaatcggccaacgcgcggggagaggcggtttgcgtattgggcgctcttccgcttcctcgctcactgactcgctgcgctcggtcgttcggctgcggcgagcggtatcagctcactcaaaggcggtaatacggttatccacagaatcaggggataacgcaggaaagaacatgtgagcaaaaggccagcaaaaggccaggaaccgtaaaaaggccgcgttgctggcgtttttccataggctccgcccccctgacgagcatcacaaaaatcgacgctcaagtcagaggtggcgaaacccgacaggactataaagataccaggcgtttccccctggaagctccctcgtgcgctctcctgttccgaccctgccgcttaccggatacctgtccgcctttctcccttcgggaagcgtggcgctttctcatagctcacgctgtaggtatctcagttcggtgtaggtcgttcgctccaagctgggctgtgtgcacgaaccccccgttcagcccgaccgctgcgccttatccggtaactatcgtcttgagtccaacccggtaagacacgacttatcgccactggcagcagccactggtaacaggattagcagagcgaggtatgtaggcggtgctacagagttcttgaagtggtggcctaactacggctacactagaagaacagtatttggtatctgcgctctgctgaagccagttaccttcggaaaaagagttggtagctcttgatccggcaaacaaaccaccgctggtagcggtggtttttttgtttgcaagcagcagattacgcgcagaaaaaaaggatctcaagaagatcctttgatcttttctacggggtctgacgctcagtggaacgaaaactcacgttaagggattttggtcatgagattatcaaaaaggatcttcacctagatccttttgatccggaatta

SEQ ID NO: 120 - DNA, 17504 bp, synthetic construct
  source 1..17504: mol_type = other DNA
attcctgtggttggcatgcacatacaaatggacgaacggataaaccttttcacgcccttttaaatatccgattattctaataaacgctcttttctcttaggtttacccgccaatatatcctgtcaaacactgatagtttaaactggcactagcctaacggtgttgactaactaggccgcttccctaattagctaacccgggggcgcgccgggaccggaattcattatgtggtctaggtaggttctatatataagaaaacttgaaatgttctaaaaaaaaattcaagcccatgcatgattgaagcaaacggtatagcaacggtgttaacctgatctagtgatctcttgcaatccttaacggccacctaccgcaggtagcaaacggcgtccccctcctcgatatctccgcggcgacctctggctttttccgcggaattgcgcggtggggacggattccacgagaccgcgacgcaaccgcctctcgccgctgggccccacaccgctcggtgccgtagcctcacgggactctttctccctcctcccccgttataaattggcttcatcccctccttgcctcatccatccaaatcccagtccccaatcccatcccttcgtaggagaaattcatcgaagctaagcgaatcctcgcgatcctctcaaggtactgcgagttttcgatccccctctcgacccctcgtatgtttgtgtttgtcgtagcgtttgattaggtatgctttccctgtttgtgttcgtcgtagcgtttgattaggtatgctttccctgttcgtgttcatcgtagtgtttgattaggtcgtgtgaggcgatggcctgctcgcgtccttcgatctgtagtcgatttgcgggtcgtggtgtagatctgcgggctgtgatgaagttatttggtgtgatctgctcgcctgattctgcgggttggctcgagtagatatgatggttggaccggttggttcgtttaccgcgctagggttgggctgggatgatgttgcatgcgccgttgcgcgtgatcccgcagcaggacttgcgtttgattgccagatctcgttacgattatgtgatttggtttggactttttagatctgtagcttctgcttatgtgccagatgcgcctactgctcatatgcctgatgataatcataaatggctgtggaactaactagttgattgcggagtcatgtatcagctacaggtgtagggactagctacaggtgtagggacttgcgtctaattgtttggtcctttactcatgttgcaattatgcaatttagtttagattgtttgttccactcatctaggctgtaaaagggacactgcttagattgctgtttaatctttttagtagattatattatattggtaacttattacccctattacatgccatacgtgacttctgctcatgcctgatgataatcatagatcactgtggaattaattagttgattgttgaatcatgtttcatgtacataccacggcacaattgcttagttccttaacaaatgcaaattttactgatccatgtatgatttgcgtggttctctaatgtgaaatactatagctacttgttagtaagaatcaggttcgtatgcttaatgctgtatgtgccttctgctcatgcctgatgataatcatatatcactggaattaattagttgatcgtttaatcatatatcaagtacataccatgccacaatttttagtcacttaacccatgcagattgaactggtccctgcatgttttgctaaattgttctattctgattagaccatatatcatgtatttttttttggtaatggttctcttattttaaatgctatatagttctggtacttgttagaaagatctgcttcatagtttagttgcctatccctcgaattaggatgctgagcagctgatcctatagctttgtttcatgtatcaattcttttgtgttcaacagtcagtttttgttagattcattgtaacttatggtcgcttactcttctggtcctcaatgcttgcagggatcccctaaatagaccatgccgaagaagaagcgcaaggtcgggggcgggggctcaggcgggggcgggagcggcggcgggggctctgggggcggcggcagcggcgggggcggcagcgggggcggcgggtcgatgctgttccaggatttcactcatctgtaccctctctcaaagactgttcggttcgagctcaagcctattgggcggactctggagcacatccacgcgaagaacttcctcagccaggacgaaaccatggccgacatgtaccagaaggtcaaggtcatcctcgacgactaccacagggacttcatcgcggacatgatgggcgaggtgaagctgacgaagctcgccgagttctacgacgtctacctcaagttccgcaagaacccgaaggacgacggcctccagaagcagctcaaggacctgcaggccgtcctgaggaaggagtccgtcaagcccatcggcagcggcggcaagtacaagaccggctacgacaggctgttcggcgccaagctgttcaaggacggcaaggagctcggcgacctggcgaagttcgtgatcgcgcaggagggcgagagctcccccaagctggcccacctggcccacttcgagaagttcagcacgtacttcaccggcttccacaggaacaggaagaacatgtacagcgacgaggacaagcacacggccatcgcctaccgcctcatccacgagaacctgccccgcttcatcgacaacctgcagatcctgacgaccatcaagcagaagcactccgccctgtacgaccagatcatcaacgagctcaccgcgagcggcctcgacgtgtccctcgccagccacctcgacggctaccacaagctcctgacccaggagggcatcaccgcctacaaccgcatcatcggcgaggtgaacggctacaccaacaagcacaaccagatctgccacaagtccgagaggatcgccaagctcaggcccctgcacaagcagatcctcagcgacggcatgggcgtgagcttcctcccgtccaagttcgccgacgactccgagatgtgccaggccgtgaacgagttctacaggcactacaccgacgtgttcgccaaggtgcagtccctgttcgacggcttcgacgaccaccagaaggacggcatctacgtggagcacaagaacctgaacgagctgtccaagcaggccttcggcgactgggccctcctgggccgcgtgctggacggctactacgtggacgtcgtgaacccggagttcaacgagcgcttcgcgaaggcgaagacggacaacgcgaaggccaagctcaccaaggagaaggacaagttcatcaagggcgtccacagcctcgcgtccctggagcaggcgatcgagcaccacaccgcgcgccacgacgacgagtccgtgcaggccggcaagctcggccagtacttcaagcacggcctggccggcgtcgacaacccgatccagaagatccacaacaaccactccaccatcaagggcttcctggagagggagcgcccggcgggcgagcgcgcgctccccaagatcaagtccggcaagaaccccgagatgacgcagctcaggcagctgaaggagctgctcgacaacgcgctcaacgtggcgcacttcgccaagctgctcacgaccaagaccacgctggacaaccaggacggcaacttctacggcgagttcggcgtcctgtacgacgagctggcgaagatcccgaccctgtacaacaaggtccgcgactacctgagccagaagcccttctccaccgagaagtacaagctcaacttcggcaacccgaccctcctgaacggctgggacctcaacaaggagaaggacaacttcggcgtgatcctccagaaggacggctgctactacctcgccctgctggacaaggcgcacaagaaggtcttcgacaacgccccgaacaccggcaagaacgtgtaccagaagatggtgtacaagctgctccccggccccaacaagatgctgccgaaggtgttcttcgcgaagtccaacctcgactactacaaccccagcgccgagctcctggacaagtacgccaagggcacgcacaagaagggcgacaacttcaacctcaaggactgccacgcgctgatcgacttcttcaaggcgggcatcaacaagcaccccgagtggcagcacttcggcttcaagttcagcccgacctccagctacagggacctcagcgacttctaccgcgaggtggagccccagggctaccaggtgaagttcgtcgacatcaacgccgactacatcgacgagctcgtcgagcagggcaagctctacctgttccagatctacaacaaggacttctccccgaaggcccacggcaagccgaacctccacacgctctacttcaaggccctcttcagcgaggacaacctggccgacccgatctacaagctcaacggcgaggcgcagatcttctaccgcaaggccagcctggacatgaacgaaacgaccatccacagggccggcgaggtcctggccaacaagaacccggacaacccgaagaagaggcagttcgtctacgacatcatcaaggacaagaggtacacccaggacaagttcatgctccacgtcccgatcaccatgaacttcggcgtccagggcatgaccatcaaggagttcaacaagaaggtcaaccagagcatccagcagtacgacgaggtgaacgtcatcggcatcgaccgcggcgagaggcacctgctctacctgacggtcatcaactccaagggcgagatcctcgagcagcgcagcctgaacaccatccagcagttcgactaccagaagaagctggacaacagggagaaggagagggtggccgcccgccaggcctggggcgagatcgaaacgatcaaggagctcaagtccggctacctcagccacgtcgtgcaccagatcaaccagctcatgctgaagtacaacgcgatcgtggtcctcgaggacctgaacttcggcttcaagaggggccgcttcaaggtggagaagcagatctaccagaacttcgagaacgccctgatcaagaagctcaaccacctggtcctcaaggacaaggcggacgacgagatcggcagctacaagaacgcgctccagctgaccaacaacttcacggacctcaagtccatcggcaagcagacgggcttcctgttctacgtgccggcgtggaacacctccaagatcgacccggaaaccggcttcgtcgacctgctcaagccgcgctacgagaacatcgcgcagtcccaggcgttcttcggcaagttcgacaagatctgctacaacaccgacaagggctacttcgagttccacatcgactacgcgaagttcaccgacaaggccaagaactccaggcagaagtgggccatctgcagccacggcgacaagcgctacgtgtacgacaagacggcgaaccagaacaagggcgcggccaagggcatcaacgtgaacgacgagctgaagtccctcttcgcgcgctaccacatcaacgacaagcagccgaacctcgtcatggacatctgccagaacaacgacaaggagttccacaagagcctgatgtgcctgctcaagaccctgctcgccctccgctactccaacgcgagctccgacgaggacttcatcctcagccccgtcgcgaacgacgagggcgtgttcttcaactccgccctcgcggacgacacgcagccgcagaacgccgacgcgaacggcgcctaccacatcgccctcaagggcctgtggctgctcaacgagctcaagaactccgacgacctgaacaaggtgaagctcgccattgacaaccagacgtggctgaatttcgctcagaatagggggggcgggggctcaggcgggggcgggagcggcggcgggggctctgggggcggcggcagcggcgggggcggcagcgggggcggcgggtcgccgaagaagaagcgcaaggtgtccggcggcagctccggcggcagcccgaagaagaagcgcaaagtgtgagggacccgatcgttcaaacatttggcaataaagtttcttaagattgaatcctgttgccggtcttgcgatgattatcatataatttctgttgaattacgttaagcatgtaataattaacatgtaatgcatgacgttatttatgagatgggtttttatgattagagtcccgcaattatacatttaatacgcgatagaaaacaaaatatagcgcgcaaactaggataaattatcgcgcgcggtgtcatctatgttactagatcggtaccgaattcattatgtggtctaggtaggttctatatataagaaaacttgaaatgttctaaaaaaaaattcaagcccatgcatgattgaagcaaacggtatagcaacggtgttaacctgatctagtgatctcttgcaatccttaacggccacctaccgcaggtagcaaacggcgtccccctcctcgatatctccgcggcgacctctggctttttccgcggaattgcgcggtggggacggattccacgagaccgcgacgcaaccgcctctcgccgctgggccccacaccgctcggtgccgtagcctcacgggactctttctccctcctcccccgttataaattggcttcatcccctccttgcctcatccatccaaatcccagtccccaatcccatcccttcgtaggagaaattcatcgaagctaagcgaatcctcgcgatcctctcaaggtactgcgagttttcgatccccctctcgacccctcgtatgtttgtgtttgtcgtagcgtttgattaggtatgctttccctgtttgtgttcgtcgtagcgtttgattaggtatgctttccctgttcgtgttcatcgtagtgtttgattaggtcgtgtgaggcgatggcctgctcgcgtccttcgatctgtagtcgatttgcgggtcgtggtgtagatctgcgggctgtgatgaagttatttggtgtgatctgctcgcctgattctgcgggttggctcgagtagatatgatggttggaccggttggttcgtttaccgcgctagggttgggctgggatgatgttgcatgcgccgttgcgcgtgatcccgcagcaggacttgcgtttgattgccagatctcgttacgattatgtgatttggtttggactttttagatctgtagcttctgcttatgtgccagatgcgcctactgctcatatgcctgatgataatcataaatggctgtggaactaactagttgattgcggagtcatgtatcagctacaggtgtagggactagctacaggtgtagggacttgcgtctaattgtttggtcctttactcatgttgcaattatgcaatttagtttagattgtttgttccactcatctaggctgtaaaagggacactgcttagattgctgtttaatctttttagtagattatattatattggtaacttattacccctattacatgccatacgtgacttctgctcatgcctgatgataatcatagatcactgtggaattaattagttgattgttgaatcatgtttcatgtacataccacggcacaattgcttagttccttaacaaatgcaaattttactgatccatgtatgatttgcgtggttctctaatgtgaaatactatagctacttgttagtaagaatcaggttcgtatgcttaatgctgtatgtgccttctgctcatgcctgatgataatcatatatcactggaattaattagttgatcgtttaatcatatatcaagtacataccatgccacaatttttagtcacttaacccatgcagattgaactggtccctgcatgttttgctaaattgttctattctgattagaccatatatcatgtatttttttttggtaatggttctcttattttaaatgctatatagttctggtacttgttagaaagatctgcttcatagtttagttgcctatccctcgaattaggatgctgagcagctgatcctatagctttgtttcatgtatcaattcttttgtgttcaacagtcagtttttgttagattcattgtaacttatggtcgcttactcttctggtcctcaatgcttgcagaagcttgaaattctgatgagtccgtgaggacgaaacgagtaagctcgtcaatttctactgtttgtagatgggaaagaccgaggagaagatctaatttctactgtttgtagatgcaccaaggaaggggaggagatcaatttctactgtttgtagatgtcacagatcacaaacttcaaatgaatttctactgtttgtagatacgcccagaaagcatacgcagtcggccggcatggtcccagcctcctcgctggcgccggctgggcaacatgcttcggcatggcgaatgggacgatcgttcaaacatttggcaataaagtttcttaagattgaatcctgttgccggtcttgcgatgattatcatataatttctgttgaattacgttaagcatgtaataattaacatgtaatgcatgacgttatttatgagatgggtttttatgattagagtcccgcaattatacatttaatacgcgatagaaaacaaaatatagcgcgcaaactaggataaattatcgcgcgcggtgtcatctatgttactagatccctaggctgcagtgcagcgtgacccggtcgtgcccctctctagagataatgagcattgcatgtctaagttataaaaaattaccacatattttttttgtcacacttgtttgaagtgcagtttatctatctttatacatatatttaaactttactctacgaataatataatctatagtactacaataatatcagtgttttagagaatcatataaatgaacagttagacatggtctaaaggacaattgagtattttgacaacaggactctacagttttatctttttagtgtgcatgtgttctcctttttttttgcaaatagcttcacctatataatacttcatccattttattagtacatccatttagggtttagggttaatggtttttatagactaatttttttagtacatctattttattctattttagcctctaaattaagaaaactaaaactctattttagtttttttatttaataatttagatataaaatagaataaaataaagtgactaaaaattaaacaaataccctttaagaaattaaaaaaactaaggaaacatttttcttgtttcgagtagataatgccagcctgttaaacgccgtcgacgagtctaacggacaccaaccagcgaaccagcagcgtcgcgtcgggccaagcgaagcagacggcacggcatctctgtcgctgcctctggacccctctcgagagttccgctccaccgttggacttgctccgctgtcggcatccagaaattgcgtggcggagcggcagacgtgagccggcacggcaggcggcctcctcctcctctcacggcaccggcagctacgggggattcctttcccaccgctccttcgctttcccttcctcgcccgccgtaataaatagacaccccctccacaccctctttccccaacctcgtgttgttcggagcgcacacacacacaaccagatctcccccaaatccacccgtcggcacctccgcttcaaggtacgccgctcgtcctccccccccccccctctctaccttctctagatcggcgttccggtccatggttagggcccggtagttctacttctgttcatgtttgtgttagatccgtgtttgtgttagatccgtgctgctagcgttcgtacacggatgcgacctgtacgtcagacacgttctgattgctaacttgccagtgtttctctttggggaatcctgggatggctctagccgttccgcagacgggatcgatttcatgattttttttgtttcgttgcatagggtttggtttgcccttttcctttatttcaatatatgccgtgcacttgtttgtcgggtcatcttttcatgcttttttttgtcttggttgtgatgatgtggtctggttgggcggtcgttctagatcggagtagaattctgtttcaaactacctggtggatttattaattttggatctgtatgtgtgtgccatacatattcatagttacgaattgaagatgatggatggaaatatcgatctaggataggtatacatgttgatgcgggttttactgatgcatatacagagatgctttttgttcgcttggttgtgatgatgtggtgtggttgggcggtcgttcattcgttctagatcggagtagaatactgtttcaaactacctggtgtatttattaattttggaactgtatgtgtgtgtcatacatcttcatagttacgagtttaagatggatggaaatatcgatctaggataggtatacatgttgatgtgggttttactgatgcatatacatgatggcatatgcagcatctattcatatgctctaaccttgagtacctatctattataataaacaagtatgttttataattattttgatcttgatatacttggatgatggcatatgcagcagctatatgtggatttttttagccctgccttcatacgctatttatttgcttggtactgtttcttttgtcgatgctcaccctgttgtttggtgttacttctgcagggatcaccgatcatgcaaaaactcattaactcagtgcaaaactatgcctggggcagcaaaacggcgttgactgaactttatggtatggaaaatccgtccagccagccgatggccgagctgtggatgggcgcacatccgaaaagcagttcacgagtgcagaatgccgccggagatatcgtttcactgcgtgatgtgattgagagtgataaatcgactctgctcggagaggccgttgccaaacgctttggcgaactgcctttcctgttcaaagtattatgcgcagcacagccactctccattcaggttcatccaaacaaacacaattctgaaatcggttttgccaaagaaaatgccgcaggtatcccgatggatgccgccgagcgtaactataaagatcctaaccacaagccggagctggtttttgcgctgacgcctttccttgcgatgaacgcgtttcgtgaattttccgagattgtctccctactccagccggtcgcaggtgcacatccggcgattgctcactttttacaacagcctgatgccgaacgtttaagcgaactgttcgccagcctgttgaatatgcagggtgaagaaaaatcccgcgcgctggcgattttaaaatcggccctcgatagccagcagggtgaaccgtggcaaacgattcgtttaatttctgaattttacccggaagacagcggtctgttctccccgctattgctgaatgtggtgaaattgaaccctggcgaagcgatgttcctgttcgctgaaacaccgcacgcttacctgcaaggcgtggcgctggaagtgatggcaaactccgataacgtgctgcgtgcgggtctgacgcctaaatacattgatattccggaactggttgccaatgtgaaattcgaagccaaaccggctaaccagttgttgacccagccggtgaaacaaggtgcagaactggacttcccgattccagtggatgattttgccttctcgctgcatgaccttagtgataaagaaaccaccattagccagcagagtgccgccattttgttctgcgtcgaaggcgatgcaacgttgtggaaaggttctcagcagttacagcttaaaccgggtgaatcagcgtttattgccgccaacgaatcaccggtgactgtcaaaggccacggccgtttagcgcgtgtttacaacaagctgtaagagcttactgaaaaaattaacatctcttgctaagctgggagctcgatccgtcgacctgcagatcgttcaaacatttggcaataaagtttcttaagattgaatcctgttgccggtcttgcgatgattatcatataatttctgttgaattacgttaagcatgtaataattaacatgtaatgcatgacgttatttatgagatgggtttttatgattagagtcccgcaattatacatttaatacgcgatagaaaacaaaatatagcgcgcaaactaggataaattatcgcgcgcggtgtcatctatgttactagatccggaccgcctgcaggcccgggggcgcgccctaattagctaacggccaggatcgccgcgtgagcctttagcaactagctagattaattaacgcaatctgttattaagttgtctaagcgtcaatttgtttacaccacaatatatcctgccaccagccagccaacagctccccgaccggcagctcggcacaaaatcaccactcgatacaggcagcccatcagaattaattctcatgtttgacagcttatcatcgactgcacggtgcaccaatgcttctggcgtcaggcagccatcggaagctgtggtatggctgtgcaggtcgtaaatcactgcataattcgtgtcgctcaaggcgcactcccgttctggataatgttttttgcgccgacatcataacggttctggcaaatattctgaaatgagctgttgacaattaatcatccggctcgtataatgtgtggaattgtgagcggataacaatttcacacaggaaacagaccatgagggaagcgttgatcgccgaagtatcgactcaactatcagaggtagttggcgtcatcgagcgccatctcgaaccgacgttgctggccgtacatttgtacggctccgcagtggatggcggcctgaagccacacagtgatattgatttgctggttacggtgaccgtaaggcttgatgaaacaacgcggcgagctttgatcaacgaccttttggaaacttcggcttcccctggagagagcgagattctccgcgctgtagaagtcaccattgttgtgcacgacgacatcattccgtggcgttatccagctaagcgcgaactgcaatttggagaatggcagcgcaatgacattcttgcaggtatcttcgagccagccacgatcgacattgatctggctatcttgctgacaaaagcaagagaacatagcgttgccttggtaggtccagcggcggaggaactctttgatccggttcctgaacaggatctatttgaggcgctaaatgaaaccttaacgctatggaactcgccgcccgactgggctggcgatgagcgaaatgtagtgcttacgttgtcccgcatttggtacagcgcagtaaccggcaaaatcgcgccgaaggatgtcgctgccgactgggcaatggagcgcctgccggcccagtatcagcccgtcatacttgaagctaggcaggcttatcttggacaagaagatcgcttggcctcgcgcgcagatcagttggaagaatttgttcactacgtgaaaggcgagatcaccaaagtagtcggcaaataaagctctagtggatctccgtacccagggatctggctcgcggcggacgcacgacgccggggcgagaccataggcgatctcctaaatcaatagtagctgtaacctcgaagcgtttcacttgtaacaacgattgagaatttttgtcataaaattgaaatacttggttcgcatttttgtcatccgcggtcagccgcaattctgacgaactgcccatttagctggagatgattgtacatccttcacgtgaaaatttctcaagcgctgtgaacaagggttcagattttagattgaaaggtgagccgttgaaacacgttcttcttgtcgatgacgacgtcgctatgcggcatcttattattgaataccttacgatccacgccttcaaagtgaccgcggtagccgacagcacccagttcacaagagtactctcttccgcgacggtcgatgtcgtggttgttgatctagatttaggtcgtgaagatgggctcgagatcgttcgtaatctggcggcaaagtctgatattccaatcataattatcagtggcgaccgccttgaggagacggataaagttgttgcactcgagctaggagcaagtgattttatcgctaagccgttcagtatcagagagtttctagcacgcattcgggttgccttgcgcgtgcgccccaacgttgtccgctccaaagaccgacggtctttttgttttactgactggacacttaatctcaggcaacgtcgcttgatgtccgaagctggcggtgaggtgaaacttacggcaggtgagttcaatcttctcctcgcgtttttagagaaaccccgcgacgttctatcgcgcgagcaacttctcattgccagtcgagtacgcgacgaggaggtttatgacaggagtatagatgttctcattttgaggctgcgccgcaaacttgaggcagatccgtcaagccctcaactgataaaaacagcaagaggtgccggttatttctttgacgcggacgtgcaggtttcgcacggggggacgatggcagcctgagccaattcccagatccccgaggaatcggcgtgagcggtcgcaaaccatccggcccggtacaaatcggcgcggcgctgggtgatgacctggtggagaagttgaaggccgcgcaggccgcccagcggcaacgcatcgaggcagaagcacgccccggtgaatcgtggcaagcggccgctgatcgaatccgcaaagaatcccggcaaccgccggcagccggtgcgccgtcgattaggaagccgcccaagggcgacgagcaaccagattttttcgttccgatgctctatgacgtgggcacccgcgatagtcgcagcatcatggacgtggccgttttccgtctgtcgaagcgtgaccgacgagctggcgaggtgatccgctacgagcttccagacgggcacgtagaggtttccgcagggccggccggcatggccagtgtgtgggattacgacctggtactgatggcggtttcccatctaaccgaatccatgaaccgataccgggaagggaagggagacaagcccggccgcgtgttccgtccacacgttgcggacgtactcaagttctgccggcgagccgatggcggaaagcagaaagacgacctggtagaaacctgcattcggttaaacaccacgcacgttgccatgcagcgtacgaagaaggccaagaacggccgcctggtgacggtatccgagggtgaagccttgattagccgctacaagatcgtaaagagcgaaaccgggcggccggagtacatcgagatcgagctggctgattggatgtaccgcgagatcacagaaggcaagaacccggacgtgctgacggttcaccccgattactttttgatcgatcccggcatcggccgttttctctaccgcctggcacgccgcgccgcaggcaaggcagaagccagatggttgttcaagacgatctacgaacgcagtggcagcgccggagagttcaagaagttctgtttcaccgtgcgcaagctgatcgggtcaaatgacctgccggagtacgatttgaaggaggaggcggggcaggctggcccgatcctagtcatgcgctaccgcaacctgatcgagggcgaagcatccgccggttcctaatgtacggagcagatgctagggcaaattgccctagcaggggaaaaaggtcgaaaaggtctctttcctgtggatagcacgtacattgggaacccaaagccgtacattgggaaccggaacccgtacattgggaacccaaagccgtacattgggaaccggtcacacatgtaagtgactgatataaaagagaaaaaaggcgatttttccgcctaaaactctttaaaacttattaaaactcttaaaacccgcctggcctgtgcataactgtctggccagcgcacagccgaagagctgcaaaaagcgcctacccttcggtcgctgcgctccctacgccccgccgcttcgcgtcggcctatcgcggccgctggccgctcaaaaatggctggcctacggccaggcaatctaccagggcgcggacaagccgcgccgtcgccactcgaccgccggcgctgaggtctgcctcgtgaagaaggtgttgctgactcataccaggcctgaatcgccccatcatccagccagaaagtgagggagccacggttgatgagagctttgttgtaggtggaccagttggtgattttgaacttttgctttgccacggaacggtctgcgttgtcgggaagatgcgtgatctgatccttcaactcagcaaaagttcgatttattcaacaaagccgccgtcccgtcaagtcagcgtaatgctctgccagtgttacaaccaattaaccaattctgattagaaaaactcatcgagcatcaaatgaaactgcaatttattcatatcaggattatcaataccatatttttgaaaaagccgtttctgtaatgaaggagaaaactcaccgaggcagttccataggatggcaagatcctggtatcggtctgcgattccgactcgtccaacatcaatacaacctattaatttcccctcgtcaaaaataaggttatcaagtgagaaatcaccatgagtgacgactgaatccggtgagaatggcaaaagctctgcattaatgaatcggccaacgcgcggggagaggcggtttgcgtattgggcgctcttccgcttcctcgctcactgactcgctgcgctcggtcgttcggctgcggcgagcggtatcagctcactcaaaggcggtaatacggttatccacagaatcaggggataacgcaggaaagaacatgtgagcaaaaggccagcaaaaggccaggaaccgtaaaaaggccgcgttgctggcgtttttccataggctccgcccccctgacgagcatcacaaaaatcgacgctcaagtcagaggtggcgaaacccgacaggactataaagataccaggcgtttccccctggaagctccctcgtgcgctctcctgttccgaccctgccgcttaccggatacctgtccgcctttctcccttcgggaagcgtggcgctttctcatagctcacgctgtaggtatctcagttcggtgtaggtcgttcgctccaagctgggctgtgtgcacgaaccccccgttcagcccgaccgctgcgccttatccggtaactatcgtcttgagtccaacccggtaagacacgacttatcgccactggcagcagccactggtaacaggattagcagagcgaggtatgtaggcggtgctacagagttcttgaagtggtggcctaactacggctacactagaagaacagtatttggtatctgcgctctgctgaagccagttaccttcggaaaaagagttggtagctcttgatccggcaaacaaaccaccgctggtagcggtggtttttttgtttgcaagcagcagattacgcgcagaaaaaaaggatctcaagaagatcctttgatcttttctacggggtctgacgctcagtggaacgaaaactcacgttaagggattttggtcatgagattatcaaaaaggatcttcacctagatccttttgatccggaatta

SEQ ID NO: 121 - DNA, 17531 bp, synthetic construct
  source 1..17531: mol_type = other DNA
attcctgtggttggcatgcacatacaaatggacgaacggataaaccttttcacgcccttttaaatatccgattattctaataaacgctcttttctcttaggtttacccgccaatatatcctgtcaaacactgatagtttaaactggcactagcctaacggtgttgactaactaggccgcttccctaattagctaacccgggggcgcgccgggaccggaattcattatgtggtctaggtaggttctatatataagaaaacttgaaatgttctaaaaaaaaattcaagcccatgcatgattgaagcaaacggtatagcaacggtgttaacctgatctagtgatctcttgcaatccttaacggccacctaccgcaggtagcaaacggcgtccccctcctcgatatctccgcggcgacctctggctttttccgcggaattgcgcggtggggacggattccacgagaccgcgacgcaaccgcctctcgccgctgggccccacaccgctcggtgccgtagcctcacgggactctttctccctcctcccccgttataaattggcttcatcccctccttgcctcatccatccaaatcccagtccccaatcccatcccttcgtaggagaaattcatcgaagctaagcgaatcctcgcgatcctctcaaggtactgcgagttttcgatccccctctcgacccctcgtatgtttgtgtttgtcgtagcgtttgattaggtatgctttccctgtttgtgttcgtcgtagcgtttgattaggtatgctttccctgttcgtgttcatcgtagtgtttgattaggtcgtgtgaggcgatggcctgctcgcgtccttcgatctgtagtcgatttgcgggtcgtggtgtagatctgcgggctgtgatgaagttatttggtgtgatctgctcgcctgattctgcgggttggctcgagtagatatgatggttggaccggttggttcgtttaccgcgctagggttgggctgggatgatgttgcatgcgccgttgcgcgtgatcccgcagcaggacttgcgtttgattgccagatctcgttacgattatgtgatttggtttggactttttagatctgtagcttctgcttatgtgccagatgcgcctactgctcatatgcctgatgataatcataaatggctgtggaactaactagttgattgcggagtcatgtatcagctacaggtgtagggactagctacaggtgtagggacttgcgtctaattgtttggtcctttactcatgttgcaattatgcaatttagtttagattgtttgttccactcatctaggctgtaaaagggacactgcttagattgctgtttaatctttttagtagattatattatattggtaacttattacccctattacatgccatacgtgacttctgctcatgcctgatgataatcatagatcactgtggaattaattagttgattgttgaatcatgtttcatgtacataccacggcacaattgcttagttccttaacaaatgcaaattttactgatccatgtatgatttgcgtggttctctaatgtgaaatactatagctacttgttagtaagaatcaggttcgtatgcttaatgctgtatgtgccttctgctcatgcctgatgataatcatatatcactggaattaattagttgatcgtttaatcatatatcaagtacataccatgccacaatttttagtcacttaacccatgcagattgaactggtccctgcatgttttgctaaattgttctattctgattagaccatatatcatgtatttttttttggtaatggttctcttattttaaatgctatatagttctggtacttgttagaaagatctgcttcatagtttagttgcctatccctcgaattaggatgctgagcagctgatcctatagctttgtttcatgtatcaattcttttgtgttcaacagtcagtttttgttagattcattgtaacttatggtcgcttactcttctggtcctcaatgcttgcagggatcccctaaatagaccatgccgaagaagaagcgcaaggtcgggggcgggggctcaggcgggggcgggagcggcggcgggggctctgggggcggcggcagcggcgggggcggcagcgggggcggcgggtcgatgctgttccaggatttcactcatctgtaccctctctcaaagactgttcggttcgagctcaagcctattgggcggactctggagcacatccacgcgaagaacttcctcagccaggacgaaaccatggccgacatgtaccagaaggtcaaggtcatcctcgacgactaccacagggacttcatcgcggacatgatgggcgaggtgaagctgacgaagctcgccgagttctacgacgtctacctcaagttccgcaagaacccgaaggacgacggcctccagaagcagctcaaggacctgcaggccgtcctgaggaaggagtccgtcaagcccatcggcagcggcggcaagtacaagaccggctacgacaggctgttcggcgccaagctgttcaaggacggcaaggagctcggcgacctggcgaagttcgtgatcgcgcaggagggcgagagctcccccaagctggcccacctggcccacttcgagaagttcagcacgtacttcaccggcttccacgacaacaggaagaacatgtacagcgacgaggacaagcacacggccatcgcctaccgcctcatccacgagaacctgccccgcttcatcgacaacctgcagatcctgacgaccatcaagcagaagcactccgccctgtacgaccagatcatcaacgagctcaccgcgagcggcctcgacgtgtccctcgccagccacctcgacggctaccacaagctcctgacccaggagggcatcaccgcctacaaccgcatcatcggcgaggtgaacggctacaccaacaagcacaaccagatctgccacaagtccgagaggatcgccaagctcaggcccctgcacaagcagatcctcagcgacggcatgggcgtgagcttcctcccgtccaagttcgccgacgactccgagatgtgccaggccgtgaacgagttctacaggcactacaccgacgtgttcgccaaggtgcagtccctgttcgacggcttcgacgaccaccagaaggacggcatctacgtggagcacaagaacctgaacgagctgtccaagcaggccttcggcgacttcgccctcctgggccgcgtgctggacggctactacgtggacgtcgtgaacccggagttcaacgagcgcttcgcgaaggcgaagacggacaacgcgaaggccaagctcaccaaggagaaggacaagttcatcaagggcgtccacagcctcgcgtccctggagcaggcgatcgagcaccacaccgcgcgccacgacgacgagtccgtgcaggccggcaagctcggccagtacttcaagcacggcctggccggcgtcgacaacccgatccagaagatccacaacaaccactccaccatcaagggcttcctggagagggagcgcccggcgggcgagcgcgcgctccccaagatcaagtccggcaagaaccccgagatgacgcagctcaggcagctgaaggagctgctcgacaacgcgctcaacgtggcgcacttcgccaagctgctcacgaccaagaccacgctggacaaccaggacggcaacttctacggcgagttcggcgtcctgtacgacgagctggcgaagatcccgaccctgtacaacaaggtccgcgactacctgagccagaagcccttctccaccgagaagtacaagctcaacttcggcaacccgaccctcctgaacggctgggacctcaacaaggagaaggacaacttcggcgtgatcctccagaaggacggctgctactacctcgccctgctggacaaggcgcacaagaaggtcttcgacaacgccccgaacaccggcaagaacgtgtaccagaagatggtgtacaagctgctccccggccccaacaagatgctgccgaaggtgttcttcgcgaagtccaacctcgactactacaaccccagcgccgagctcctggacaagtacgccaagggcacgcacaagaagggcgacaacttcaacctcaaggactgccacgcgctgatcgacttcttcaaggcgggcatcaacaagcaccccgagtggcagcacttcggcttcaagttcagcccgacctccagctacagggacctcagcgacttctaccgcgaggtggagccccagggctaccaggtgaagttcgtcgacatcaacgccgactacatcgacgagctcgtcgagcagggcaagctctacctgttccagatctacaacaaggacttctccccgaaggcccacggcaagccgaacctccacacgctctacttcaaggccctcttcagcgaggacaacctggccgacccgatctacaagctcaacggcgaggcgcagatcttctaccgcaaggccagcctggacatgaacgaaacgaccatccacagggccggcgaggtcctggccaacaagaacccggacaacccgaagaagaggcagttcgtctacgacatcatcaaggacaagaggtacacccaggacaagttcatgctccacgtcccgatcaccatgaacttcggcgtccagggcatgaccatcaaggagttcaacaagaaggtcaaccagagcatccagcagtacgacgaggtgaacgtcatcggcatcgaccgcggcgagaggcacctgctctacctgacggtcatcaactccaagggcgagatcctcgagcagcgcagcctgaacgacatcacgaccgcgagcgccaacggcacgcaggtcaccacgccgtaccacaagatcctcgacaagcgcgagatcgagaggctgaacgcgcgcaagggctggggcgagatcgaaacgatcaaggagctcaagtccggctacctcagccacgtcgtgcaccagatcaaccagctcatgctgaagtacaacgcgatcgtggtcctcgaggacctgaacttcggcttcaagaggggccgcttcaaggtggagaagcagatctaccagaacttcgagaacgccctgatcaagaagctcaaccacctggtcctcaaggacaaggcggacgacgagatcggcagctacaagaacgcgctccagctgaccaacaacttcacggacctcaagtccatcggcaagcagacgggcttcctgttctacgtgccggcgtggaacacctccaagatcgacccggaaaccggcttcgtcgacctgctcaagccgcgctacgagaacatcgcgcagtcccaggcgttcttcggcaagttcgacaagatctgctacaacaccgacaagggctacttcgagttccacatcgactacgcgaagttcaccgacaaggccaagaactccaggcagaagtgggccatctgcagccacggcgacaagcgctacgtgtacgacaagacggcgaaccagaacaagggcgcggccaagggcatcaacgtgaacgacgagctgaagtccctcttcgcgcgctaccacatcaacgacaagcagccgaacctcgtcatggacatctgccagaacaacgacaaggagttccacaagagcctgatgtgcctgctcaagaccctgctcgccctccgctactccaacgcgagctccgacgaggacttcatcctcagccccgtcgcgaacgacgagggcgtgttcttcaactccgccctcgcggacgacacgcagccgcagaacgccgacgcgaacggcgcctaccacatcgccctcaagggcctgtggctgctcaacgagctcaagaactccgacgacctgaacaaggtgaagctcgccattgacaaccagacgtggctgaatttcgctcagaatagggggggcgggggctcaggcgggggcgggagcggcggcgggggctctgggggcggcggcagcggcgggggcggcagcgggggcggcgggtcgccgaagaagaagcgcaaggtgtccggcggcagctccggcggcagcccgaagaagaagcgcaaagtgtgagggacccgatcgttcaaacatttggcaataaagtttcttaagattgaatcctgttgccggtcttgcgatgattatcatataatttctgttgaattacgttaagcatgtaataattaacatgtaatgcatgacgttatttatgagatgggtttttatgattagagtcccgcaattatacatttaatacgcgatagaaaacaaaatatagcgcgcaaactaggataaattatcgcgcgcggtgtcatctatgttactagatcggtaccgaattcattatgtggtctaggtaggttctatatataagaaaacttgaaatgttctaaaaaaaaattcaagcccatgcatgattgaagcaaacggtatagcaacggtgttaacctgatctagtgatctcttgcaatccttaacggccacctaccgcaggtagcaaacggcgtccccctcctcgatatctccgcggcgacctctggctttttccgcggaattgcgcggtggggacggattccacgagaccgcgacgcaaccgcctctcgccgctgggccccacaccgctcggtgccgtagcctcacgggactctttctccctcctcccccgttataaattggcttcatcccctccttgcctcatccatccaaatcccagtccccaatcccatcccttcgtaggagaaattcatcgaagctaagcgaatcctcgcgatcctctcaaggtactgcgagttttcgatccccctctcgacccctcgtatgtttgtgtttgtcgtagcgtttgattaggtatgctttccctgtttgtgttcgtcgtagcgtttgattaggtatgctttccctgttcgtgttcatcgtagtgtttgattaggtcgtgtgaggcgatggcctgctcgcgtccttcgatctgtagtcgatttgcgggtcgtggtgtagatctgcgggctgtgatgaagttatttggtgtgatctgctcgcctgattctgcgggttggctcgagtagatatgatggttggaccggttggttcgtttaccgcgctagggttgggctgggatgatgttgcatgcgccgttgcgcgtgatcccgcagcaggacttgcgtttgattgccagatctcgttacgattatgtgatttggtttggactttttagatctgtagcttctgcttatgtgccagatgcgcctactgctcatatgcctgatgataatcataaatggctgtggaactaactagttgattgcggagtcatgtatcagctacaggtgtagggactagctacaggtgtagggacttgcgtctaattgtttggtcctttactcatgttgcaattatgcaatttagtttagattgtttgttccactcatctaggctgtaaaagggacactgcttagattgctgtttaatctttttagtagattatattatattggtaacttattacccctattacatgccatacgtgacttctgctcatgcctgatgataatcatagatcactgtggaattaattagttgattgttgaatcatgtttcatgtacataccacggcacaattgcttagttccttaacaaatgcaaattttactgatccatgtatgatttgcgtggttctctaatgtgaaatactatagctacttgttagtaagaatcaggttcgtatgcttaatgctgtatgtgccttctgctcatgcctgatgataatcatatatcactggaattaattagttgatcgtttaatcatatatcaagtacataccatgccacaatttttagtcacttaacccatgcagattgaactggtccctgcatgttttgctaaattgttctattctgattagaccatatatcatgtatttttttttggtaatggttctcttattttaaatgctatatagttctggtacttgttagaaagatctgcttcatagtttagttgcctatccctcgaattaggatgctgagcagctgatcctatagctttgtttcatgtatcaattcttttgtgttcaacagtcagtttttgttagattcattgtaacttatggtcgcttactcttctggtcctcaatgcttgcagaagcttgaaattctgatgagtccgtgaggacgaaacgagtaagctcgtcaatttctactgtttgtagatgggaaagaccgaggagaagatctaatttctactgtttgtagatgcaccaaggaaggggaggagatcaatttctactgtttgtagatgtcacagatcacaaacttcaaatgaatttctactgtttgtagatacgcccagaaagcatacgcagtcggccggcatggtcccagcctcctcgctggcgccggctgggcaacatgcttcggcatggcgaatgggacgatcgttcaaacatttggcaataaagtttcttaagattgaatcctgttgccggtcttgcgatgattatcatataatttctgttgaattacgttaagcatgtaataattaacatgtaatgcatgacgttatttatgagatgggtttttatgattagagtcccgcaattatacatttaatacgcgatagaaaacaaaatatagcgcgcaaactaggataaattatcgcgcgcggtgtcatctatgttactagatccctaggctgcagtgcagcgtgacccggtcgtgcccctctctagagataatgagcattgcatgtctaagttataaaaaattaccacatattttttttgtcacacttgtttgaagtgcagtttatctatctttatacatatatttaaactttactctacgaataatataatctatagtactacaataatatcagtgttttagagaatcatataaatgaacagttagacatggtctaaaggacaattgagtattttgacaacaggactctacagttttatctttttagtgtgcatgtgttctcctttttttttgcaaatagcttcacctatataatacttcatccattttattagtacatccatttagggtttagggttaatggtttttatagactaatttttttagtacatctattttattctattttagcctctaaattaagaaaactaaaactctattttagtttttttatttaataatttagatataaaatagaataaaataaagtgactaaaaattaaacaaataccctttaagaaattaaaaaaactaaggaaacatttttcttgtttcgagtagataatgccagcctgttaaacgccgtcgacgagtctaacggacaccaaccagcgaaccagcagcgtcgcgtcgggccaagcgaagcagacggcacggcatctctgtcgctgcctctggacccctctcgagagttccgctccaccgttggacttgctccgctgtcggcatccagaaattgcgtggcggagcggcagacgtgagccggcacggcaggcggcctcctcctcctctcacggcaccggcagctacgggggattcctttcccaccgctccttcgctttcccttcctcgcccgccgtaataaatagacaccccctccacaccctctttccccaacctcgtgttgttcggagcgcacacacacacaaccagatctcccccaaatccacccgtcggcacctccgcttcaaggtacgccgctcgtcctccccccccccccctctctaccttctctagatcggcgttccggtccatggttagggcccggtagttctacttctgttcatgtttgtgttagatccgtgtttgtgttagatccgtgctgctagcgttcgtacacggatgcgacctgtacgtcagacacgttctgattgctaacttgccagtgtttctctttggggaatcctgggatggctctagccgttccgcagacgggatcgatttcatgattttttttgtttcgttgcatagggtttggtttgcccttttcctttatttcaatatatgccgtgcacttgtttgtcgggtcatcttttcatgcttttttttgtcttggttgtgatgatgtggtctggttgggcggtcgttctagatcggagtagaattctgtttcaaactacctggtggatttattaattttggatctgtatgtgtgtgccatacatattcatagttacgaattgaagatgatggatggaaatatcgatctaggataggtatacatgttgatgcgggttttactgatgcatatacagagatgctttttgttcgcttggttgtgatgatgtggtgtggttgggcggtcgttcattcgttctagatcggagtagaatactgtttcaaactacctggtgtatttattaattttggaactgtatgtgtgtgtcatacatcttcatagttacgagtttaagatggatggaaatatcgatctaggataggtatacatgttgatgtgggttttactgatgcatatacatgatggcatatgcagcatctattcatatgctctaaccttgagtacctatctattataataaacaagtatgttttataattattttgatcttgatatacttggatgatggcatatgcagcagctatatgtggatttttttagccctgccttcatacgctatttatttgcttggtactgtttcttttgtcgatgctcaccctgttgtttggtgttacttctgcagggatcaccgatcatgcaaaaactcattaactcagtgcaaaactatgcctggggcagcaaaacggcgttgactgaactttatggtatggaaaatccgtccagccagccgatggccgagctgtggatgggcgcacatccgaaaagcagttcacgagtgcagaatgccgccggagatatcgtttcactgcgtgatgtgattgagagtgataaatcgactctgctcggagaggccgttgccaaacgctttggcgaactgcctttcctgttcaaagtattatgcgcagcacagccactctccattcaggttcatccaaacaaacacaattctgaaatcggttttgccaaagaaaatgccgcaggtatcccgatggatgccgccgagcgtaactataaagatcctaaccacaagccggagctggtttttgcgctgacgcctttccttgcgatgaacgcgtttcgtgaattttccgagattgtctccctactccagccggtcgcaggtgcacatccggcgattgctcactttttacaacagcctgatgccgaacgtttaagcgaactgttcgccagcctgttgaatatgcagggtgaagaaaaatcccgcgcgctggcgattttaaaatcggccctcgatagccagcagggtgaaccgtggcaaacgattcgtttaatttctgaattttacccggaagacagcggtctgttctccccgctattgctgaatgtggtgaaattgaaccctggcgaagcgatgttcctgttcgctgaaacaccgcacgcttacctgcaaggcgtggcgctggaagtgatggcaaactccgataacgtgctgcgtgcgggtctgacgcctaaatacattgatattccggaactggttgccaatgtgaaattcgaagccaaaccggctaaccagttgttgacccagccggtgaaacaaggtgcagaactggacttcccgattccagtggatgattttgccttctcgctgcatgaccttagtgataaagaaaccaccattagccagcagagtgccgccattttgttctgcgtcgaaggcgatgcaacgttgtggaaaggttctcagcagttacagcttaaaccgggtgaatcagcgtttattgccgccaacgaatcaccggtgactgtcaaaggccacggccgtttagcgcgtgtttacaacaagctgtaagagcttactgaaaaaattaacatctcttgctaagctgggagctcgatccgtcgacctgcagatcgttcaaacatttggcaataaagtttcttaagattgaatcctgttgccggtcttgcgatgattatcatataatttctgttgaattacgttaagcatgtaataattaacatgtaatgcatgacgttatttatgagatgggtttttatgattagagtcccgcaattatacatttaatacgcgatagaaaacaaaatatagcgcgcaaactaggataaattatcgcgcgcggtgtcatctatgttactagatccggaccgcctgcaggcccgggggcgcgccctaattagctaacggccaggatcgccgcgtgagcctttagcaactagctagattaattaacgcaatctgttattaagttgtctaagcgtcaatttgtttacaccacaatatatcctgccaccagccagccaacagctccccgaccggcagctcggcacaaaatcaccactcgatacaggcagcccatcagaattaattctcatgtttgacagcttatcatcgactgcacggtgcaccaatgcttctggcgtcaggcagccatcggaagctgtggtatggctgtgcaggtcgtaaatcactgcataattcgtgtcgctcaaggcgcactcccgttctggataatgttttttgcgccgacatcataacggttctggcaaatattctgaaatgagctgttgacaattaatcatccggctcgtataatgtgtggaattgtgagcggataacaatttcacacaggaaacagaccatgagggaagcgttgatcgccgaagtatcgactcaactatcagaggtagttggcgtcatcgagcgccatctcgaaccgacgttgctggccgtacatttgtacggctccgcagtggatggcggcctgaagccacacagtgatattgatttgctggttacggtgaccgtaaggcttgatgaaacaacgcggcgagctttgatcaacgaccttttggaaacttcggcttcccctggagagagcgagattctccgcgctgtagaagtcaccattgttgtgcacgacgacatcattccgtggcgttatccagctaagcgcgaactgcaatttggagaatggcagcgcaatgacattcttgcaggtatcttcgagccagccacgatcgacattgatctggctatcttgctgacaaaagcaagagaacatagcgttgccttggtaggtccagcggcggaggaactctttgatccggttcctgaacaggatctatttgaggcgctaaatgaaaccttaacgctatggaactcgccgcccgactgggctggcgatgagcgaaatgtagtgcttacgttgtcccgcatttggtacagcgcagtaaccggcaaaatcgcgccgaaggatgtcgctgccgactgggcaatggagcgcctgccggcccagtatcagcccgtcatacttgaagctaggcaggcttatcttggacaagaagatcgcttggcctcgcgcgcagatcagttggaagaatttgttcactacgtgaaaggcgagatcaccaaagtagtcggcaaataaagctctagtggatctccgtacccagggatctggctcgcggcggacgcacgacgccggggcgagaccataggcgatctcctaaatcaatagtagctgtaacctcgaagcgtttcacttgtaacaacgattgagaatttttgtcataaaattgaaatacttggttcgcatttttgtcatccgcggtcagccgcaattctgacgaactgcccatttagctggagatgattgtacatccttcacgtgaaaatttctcaagcgctgtgaacaagggttcagattttagattgaaaggtgagccgttgaaacacgttcttcttgtcgatgacgacgtcgctatgcggcatcttattattgaataccttacgatccacgccttcaaagtgaccgcggtagccgacagcacccagttcacaagagtactctcttccgcgacggtcgatgtcgtggttgttgatctagatttaggtcgtgaagatgggctcgagatcgttcgtaatctggcggcaaagtctgatattccaatcataattatcagtggcgaccgccttgaggagacggataaagttgttgcactcgagctaggagcaagtgattttatcgctaagccgttcagtatcagagagtttctagcacgcattcgggttgccttgcgcgtgcgccccaacgttgtccgctccaaagaccgacggtctttttgttttactgactggacacttaatctcaggcaacgtcgcttgatgtccgaagctggcggtgaggtgaaacttacggcaggtgagttcaatcttctcctcgcgtttttagagaaaccccgcgacgttctatcgcgcgagcaacttctcattgccagtcgagtacgcgacgaggaggtttatgacaggagtatagatgttctcattttgaggctgcgccgcaaacttgaggcagatccgtcaagccctcaactgataaaaacagcaagaggtgccggttatttctttgacgcggacgtgcaggtttcgcacggggggacgatggcagcctgagccaattcccagatccccgaggaatcggcgtgagcggtcgcaaaccatccggcccggtacaaatcggcgcggcgctgggtgatgacctggtggagaagttgaaggccgcgcaggccgcccagcggcaacgcatcgaggcagaagcacgccccggtgaatcgtggcaagcggccgctgatcgaatccgcaaagaatcccggcaaccgccggcagccggtgcgccgtcgattaggaagccgcccaagggcgacgagcaaccagattttttcgttccgatgctctatgacgtgggcacccgcgatagtcgcagcatcatggacgtggccgttttccgtctgtcgaagcgtgaccgacgagctggcgaggtgatccgctacgagcttccagacgggcacgtagaggtttccgcagggccggccggcatggccagtgtgtgggattacgacctggtactgatggcggtttcccatctaaccgaatccatgaaccgataccgggaagggaagggagacaagcccggccgcgtgttccgtccacacgttgcggacgtactcaagttctgccggcgagccgatggcggaaagcagaaagacgacctggtagaaacctgcattcggttaaacaccacgcacgttgccatgcagcgtacgaagaaggccaagaacggccgcctggtgacggtatccgagggtgaagccttgattagccgctacaagatcgtaaagagcgaaaccgggcggccggagtacatcgagatcgagctggctgattggatgtaccgcgagatcacagaaggcaagaacccggacgtgctgacggttcaccccgattactttttgatcgatcccggcatcggccgttttctctaccgcctggcacgccgcgccgcaggcaaggcagaagccagatggttgttcaagacgatctacgaacgcagtggcagcgccggagagttcaagaagttctgtttcaccgtgcgcaagctgatcgggtcaaatgacctgccggagtacgatttgaaggaggaggcggggcaggctggcccgatcctagtcatgcgctaccgcaacctgatcgagggcgaagcatccgccggttcctaatgtacggagcagatgctagggcaaattgccctagcaggggaaaaaggtcgaaaaggtctctttcctgtggatagcacgtacattgggaacccaaagccgtacattgggaaccggaacccgtacattgggaacccaaagccgtacattgggaaccggtcacacatgtaagtgactgatataaaagagaaaaaaggcgatttttccgcctaaaactctttaaaacttattaaaactcttaaaacccgcctggcctgtgcataactgtctggccagcgcacagccgaagagctgcaaaaagcgcctacccttcggtcgctgcgctccctacgccccgccgcttcgcgtcggcctatcgcggccgctggccgctcaaaaatggctggcctacggccaggcaatctaccagggcgcggacaagccgcgccgtcgccactcgaccgccggcgctgaggtctgcctcgtgaagaaggtgttgctgactcataccaggcctgaatcgccccatcatccagccagaaagtgagggagccacggttgatgagagctttgttgtaggtggaccagttggtgattttgaacttttgctttgccacggaacggtctgcgttgtcgggaagatgcgtgatctgatccttcaactcagcaaaagttcgatttattcaacaaagccgccgtcccgtcaagtcagcgtaatgctctgccagtgttacaaccaattaaccaattctgattagaaaaactcatcgagcatcaaatgaaactgcaatttattcatatcaggattatcaataccatatttttgaaaaagccgtttctgtaatgaaggagaaaactcaccgaggcagttccataggatggcaagatcctggtatcggtctgcgattccgactcgtccaacatcaatacaacctattaatttcccctcgtcaaaaataaggttatcaagtgagaaatcaccatgagtgacgactgaatccggtgagaatggcaaaagctctgcattaatgaatcggccaacgcgcggggagaggcggtttgcgtattgggcgctcttccgcttcctcgctcactgactcgctgcgctcggtcgttcggctgcggcgagcggtatcagctcactcaaaggcggtaatacggttatccacagaatcaggggataacgcaggaaagaacatgtgagcaaaaggccagcaaaaggccaggaaccgtaaaaaggccgcgttgctggcgtttttccataggctccgcccccctgacgagcatcacaaaaatcgacgctcaagtcagaggtggcgaaacccgacaggactataaagataccaggcgtttccccctggaagctccctcgtgcgctctcctgttccgaccctgccgcttaccggatacctgtccgcctttctcccttcgggaagcgtggcgctttctcatagctcacgctgtaggtatctcagttcggtgtaggtcgttcgctccaagctgggctgtgtgcacgaaccccccgttcagcccgaccgctgcgccttatccggtaactatcgtcttgagtccaacccggtaagacacgacttatcgccactggcagcagccactggtaacaggattagcagagcgaggtatgtaggcggtgctacagagttcttgaagtggtggcctaactacggctacactagaagaacagtatttggtatctgcgctctgctgaagccagttaccttcggaaaaagagttggtagctcttgatccggcaaacaaaccaccgctggtagcggtggtttttttgtttgcaagcagcagattacgcgcagaaaaaaaggatctcaagaagatcctttgatcttttctacggggtctgacgctcagtggaacgaaaactcacgttaagggattttggtcatgagattatcaaaaaggatcttcacctagatccttttgatccggaatta

SEQ ID NO: 122 - DNA, 17531 bp, synthetic construct
  source 1..17531: mol_type = other DNA
attcctgtggttggcatgcacatacaaatggacgaacggataaaccttttcacgcccttttaaatatccgattattctaataaacgctcttttctcttaggtttacccgccaatatatcctgtcaaacactgatagtttaaactggcactagcctaacggtgttgactaactaggccgcttccctaattagctaacccgggggcgcgccgggaccggaattcattatgtggtctaggtaggttctatatataagaaaacttgaaatgttctaaaaaaaaattcaagcccatgcatgattgaagcaaacggtatagcaacggtgttaacctgatctagtgatctcttgcaatccttaacggccacctaccgcaggtagcaaacggcgtccccctcctcgatatctccgcggcgacctctggctttttccgcggaattgcgcggtggggacggattccacgagaccgcgacgcaaccgcctctcgccgctgggccccacaccgctcggtgccgtagcctcacgggactctttctccctcctcccccgttataaattggcttcatcccctccttgcctcatccatccaaatcccagtccccaatcccatcccttcgtaggagaaattcatcgaagctaagcgaatcctcgcgatcctctcaaggtactgcgagttttcgatccccctctcgacccctcgtatgtttgtgtttgtcgtagcgtttgattaggtatgctttccctgtttgtgttcgtcgtagcgtttgattaggtatgctttccctgttcgtgttcatcgtagtgtttgattaggtcgtgtgaggcgatggcctgctcgcgtccttcgatctgtagtcgatttgcgggtcgtggtgtagatctgcgggctgtgatgaagttatttggtgtgatctgctcgcctgattctgcgggttggctcgagtagatatgatggttggaccggttggttcgtttaccgcgctagggttgggctgggatgatgttgcatgcgccgttgcgcgtgatcccgcagcaggacttgcgtttgattgccagatctcgttacgattatgtgatttggtttggactttttagatctgtagcttctgcttatgtgccagatgcgcctactgctcatatgcctgatgataatcataaatggctgtggaactaactagttgattgcggagtcatgtatcagctacaggtgtagggactagctacaggtgtagggacttgcgtctaattgtttggtcctttactcatgttgcaattatgcaatttagtttagattgtttgttccactcatctaggctgtaaaagggacactgcttagattgctgtttaatctttttagtagattatattatattggtaacttattacccctattacatgccatacgtgacttctgctcatgcctgatgataatcatagatcactgtggaattaattagttgattgttgaatcatgtttcatgtacataccacggcacaattgcttagttccttaacaaatgcaaattttactgatccatgtatgatttgcgtggttctctaatgtgaaatactatagctacttgttagtaagaatcaggttcgtatgcttaatgctgtatgtgccttctgctcatgcctgatgataatcatatatcactggaattaattagttgatcgtttaatcatatatcaagtacataccatgccacaatttttagtcacttaacccatgcagattgaactggtccctgcatgttttgctaaattgttctattctgattagaccatatatcatgtatttttttttggtaatggttctcttattttaaatgctatatagttctggtacttgttagaaagatctgcttcatagtttagttgcctatccctcgaattaggatgctgagcagctgatcctatagctttgtttcatgtatcaattcttttgtgttcaacagtcagtttttgttagattcattgtaacttatggtcgcttactcttctggtcctcaatgcttgcagggatcccctaaatagaccatgccgaagaagaagcgcaaggtcgggggcgggggctcaggcgggggcgggagcggcggcgggggctctgggggcggcggcagcggcgggggcggcagcgggggcggcgggtcgatgctgttccaggatttcactcatctgtaccctctctcaaagactgttcggttcgagctcaagcctattgggcggactctggagcacatccacgcgaagaacttcctcagccaggacgaaaccatggccgacatgtaccagaaggtcaaggtcatcctcgacgactaccacagggacttcatcgcggacatgatgggcgaggtgaagctgacgaagctcgccgagttctacgacgtctacctcaagttccgcaagaacccgaaggacgacggcctccagaagcagctcaaggacctgcaggccgtcctgaggaaggagtccgtcaagcccatcggcagcggcggcaagtacaagaccggctacgacaggctgttcggcgccaagctgttcaaggacggcaaggagctcggcgacctggcgaagttcgtgatcgcgcaggagggcgagagctcccccaagctggcccacctggcccacttcgagaagttcagcacgtacttcaccggcttccacaggaacaggaagaacatgtacagcgacgaggacaagcacacggccatcgcctaccgcctcatccacgagaacctgccccgcttcatcgacaacctgcagatcctgacgaccatcaagcagaagcactccgccctgtacgaccagatcatcaacgagctcaccgcgagcggcctcgacgtgtccctcgccagccacctcgacggctaccacaagctcctgacccaggagggcatcaccgcctacaaccgcatcatcggcgaggtgaacggctacaccaacaagcacaaccagatctgccacaagtccgagaggatcgccaagctcaggcccctgcacaagcagatcctcagcgacggcatgggcgtgagcttcctcccgtccaagttcgccgacgactccgagatgtgccaggccgtgaacgagttctacaggcactacaccgacgtgttcgccaaggtgcagtccctgttcgacggcttcgacgaccaccagaaggacggcatctacgtggagcacaagaacctgaacgagctgtccaagcaggccttcggcgacttcgccctcctgggccgcgtgctggacggctactacgtggacgtcgtgaacccggagttcaacgagcgcttcgcgaaggcgaagacggacaacgcgaaggccaagctcaccaaggagaaggacaagttcatcaagggcgtccacagcctcgcgtccctggagcaggcgatcgagcaccacaccgcgcgccacgacgacgagtccgtgcaggccggcaagctcggccagtacttcaagcacggcctggccggcgtcgacaacccgatccagaagatccacaacaaccactccaccatcaagggcttcctggagagggagcgcccggcgggcgagcgcgcgctccccaagatcaagtccggcaagaaccccgagatgacgcagctcaggcagctgaaggagctgctcgacaacgcgctcaacgtggcgcacttcgccaagctgctcacgaccaagaccacgctggacaaccaggacggcaacttctacggcgagttcggcgtcctgtacgacgagctggcgaagatcccgaccctgtacaacaaggtccgcgactacctgagccagaagcccttctccaccgagaagtacaagctcaacttcggcaacccgaccctcctgaacggctgggacctcaacaaggagaaggacaacttcggcgtgatcctccagaaggacggctgctactacctcgccctgctggacaaggcgcacaagaaggtcttcgacaacgccccgaacaccggcaagaacgtgtaccagaagatggtgtacaagctgctccccggccccaacaagatgctgccgaaggtgttcttcgcgaagtccaacctcgactactacaaccccagcgccgagctcctggacaagtacgccaagggcacgcacaagaagggcgacaacttcaacctcaaggactgccacgcgctgatcgacttcttcaaggcgggcatcaacaagcaccccgagtggcagcacttcggcttcaagttcagcccgacctccagctacagggacctcagcgacttctaccgcgaggtggagccccagggctaccaggtgaagttcgtcgacatcaacgccgactacatcgacgagctcgtcgagcagggcaagctctacctgttccagatctacaacaaggacttctccccgaaggcccacggcaagccgaacctccacacgctctacttcaaggccctcttcagcgaggacaacctggccgacccgatctacaagctcaacggcgaggcgcagatcttctaccgcaaggccagcctggacatgaacgaaacgaccatccacagggccggcgaggtcctggccaacaagaacccggacaacccgaagaagaggcagttcgtctacgacatcatcaaggacaagaggtacacccaggacaagttcatgctccacgtcccgatcaccatgaacttcggcgtccagggcatgaccatcaaggagttcaacaagaaggtcaaccagagcatccagcagtacgacgaggtgaacgtcatcggcatcgaccgcggcgagaggcacctgctctacctgacggtcatcaactccaagggcgagatcctcgagcagcgcagcctgaacgacatcacgaccgcgagcgccaacggcacgcaggtcaccacgccgtaccacaagatcctcgacaagcgcgagatcgagaggctgaacgcgcgcaagggctggggcgagatcgaaacgatcaaggagctcaagtccggctacctcagccacgtcgtgcaccagatcaaccagctcatgctgaagtacaacgcgatcgtggtcctcgaggacctgaacttcggcttcaagaggggccgcttcaaggtggagaagcagatctaccagaacttcgagaacgccctgatcaagaagctcaaccacctggtcctcaaggacaaggcggacgacgagatcggcagctacaagaacgcgctccagctgaccaacaacttcacggacctcaagtccatcggcaagcagacgggcttcctgttctacgtgccggcgtggaacacctccaagatcgacccggaaaccggcttcgtcgacctgctcaagccgcgctacgagaacatcgcgcagtcccaggcgttcttcggcaagttcgacaagatctgctacaacaccgacaagggctacttcgagttccacatcgactacgcgaagttcaccgacaaggccaagaactccaggcagaagtgggccatctgcagccacggcgacaagcgctacgtgtacgacaagacggcgaaccagaacaagggcgcggccaagggcatcaacgtgaacgacgagctgaagtccctcttcgcgcgctaccacatcaacgacaagcagccgaacctcgtcatggacatctgccagaacaacgacaaggagttccacaagagcctgatgtgcctgctcaagaccctgctcgccctccgctactccaacgcgagctccgacgaggacttcatcctcagccccgtcgcgaacgacgagggcgtgttcttcaactccgccctcgcggacgacacgcagccgcagaacgccgacgcgaacggcgcctaccacatcgccctcaagggcctgtggctgctcaacgagctcaagaactccgacgacctgaacaaggtgaagctcgccattgacaaccagacgtggctgaatttcgctcagaatagggggggcgggggctcaggcgggggcgggagcggcggcgggggctctgggggcggcggcagcggcgggggcggcagcgggggcggcgggtcgccgaagaagaagcgcaaggtgtccggcggcagctccggcggcagcccgaagaagaagcgcaaagtgtgagggacccgatcgttcaaacatttggcaataaagtttcttaagattgaatcctgttgccggtcttgcgatgattatcatataatttctgttgaattacgttaagcatgtaataattaacatgtaatgcatgacgttatttatgagatgggtttttatgattagagtcccgcaattatacatttaatacgcgatagaaaacaaaatatagcgcgcaaactaggataaattatcgcgcgcggtgtcatctatgttactagatcggtaccgaattcattatgtggtctaggtaggttctatatataagaaaacttgaaatgttctaaaaaaaaattcaagcccatgcatgattgaagcaaacggtatagcaacggtgttaacctgatctagtgatctcttgcaatccttaacggccacctaccgcaggtagcaaacggcgtccccctcctcgatatctccgcggcgacctctggctttttccgcggaattgcgcggtggggacggattccacgagaccgcgacgcaaccgcctctcgccgctgggccccacaccgctcggtgccgtagcctcacgggactctttctccctcctcccccgttataaattggcttcatcccctccttgcctcatccatccaaatcccagtccccaatcccatcccttcgtaggagaaattcatcgaagctaagcgaatcctcgcgatcctctcaaggtactgcgagttttcgatccccctctcgacccctcgtatgtttgtgtttgtcgtagcgtttgattaggtatgctttccctgtttgtgttcgtcgtagcgtttgattaggtatgctttccctgttcgtgttcatcgtagtgtttgattaggtcgtgtgaggcgatggcctgctcgcgtccttcgatctgtagtcgatttgcgggtcgtggtgtagatctgcgggctgtgatgaagttatttggtgtgatctgctcgcctgattctgcgggttggctcgagtagatatgatggttggaccggttggttcgtttaccgcgctagggttgggctgggatgatgttgcatgcgccgttgcgcgtgatcccgcagcaggacttgcgtttgattgccagatctcgttacgattatgtgatttggtttggactttttagatctgtagcttctgcttatgtgccagatgcgcctactgctcatatgcctgatgataatcataaatggctgtggaactaactagttgattgcggagtcatgtatcagctacaggtgtagggactagctacaggtgtagggacttgcgtctaattgtttggtcctttactcatgttgcaattatgcaatttagtttagattgtttgttccactcatctaggctgtaaaagggacactgcttagattgctgtttaatctttttagtagattatattatattggtaacttattacccctattacatgccatacgtgacttctgctcatgcctgatgataatcatagatcactgtggaattaattagttgattgttgaatcatgtttcatgtacataccacggcacaattgcttagttccttaacaaatgcaaattttactgatccatgtatgatttgcgtggttctctaatgtgaaatactatagctacttgttagtaagaatcaggttcgtatgcttaatgctgtatgtgccttctgctcatgcctgatgataatcatatatcactggaattaattagttgatcgtttaatcatatatcaagtacataccatgccacaatttttagtcacttaacccatgcagattgaactggtccctgcatgttttgctaaattgttctattctgattagaccatatatcatgtatttttttttggtaatggttctcttattttaaatgctatatagttctggtacttgttagaaagatctgcttcatagtttagttgcctatccctcgaattaggatgctgagcagctgatcctatagctttgtttcatgtatcaattcttttgtgttcaacagtcagtttttgttagattcattgtaacttatggtcgcttactcttctggtcctcaatgcttgcagaagcttgaaattctgatgagtccgtgaggacgaaacgagtaagctcgtcaatttctactgtttgtagatgggaaagaccgaggagaagatctaatttctactgtttgtagatgcaccaaggaaggggaggagatcaatttctactgtttgtagatgtcacagatcacaaacttcaaatgaatttctactgtttgtagatacgcccagaaagcatacgcagtcggccggcatggtcccagcctcctcgctggcgccggctgggcaacatgcttcggcatggcgaatgggacgatcgttcaaacatttggcaataaagtttcttaagattgaatcctgttgccggtcttgcgatgattatcatataatttctgttgaattacgttaagcatgtaataattaacatgtaatgcatgacgttatttatgagatgggtttttatgattagagtcccgcaattatacatttaatacgcgatagaaaacaaaatatagcgcgcaaactaggataaattatcgcgcgcggtgtcatctatgttactagatccctaggctgcagtgcagcgtgacccggtcgtgcccctctctagagataatgagcattgcatgtctaagttataaaaaattaccacatattttttttgtcacacttgtttgaagtgcagtttatctatctttatacatatatttaaactttactctacgaataatataatctatagtactacaataatatcagtgttttagagaatcatataaatgaacagttagacatggtctaaaggacaattgagtattttgacaacaggactctacagttttatctttttagtgtgcatgtgttctcctttttttttgcaaatagcttcacctatataatacttcatccattttattagtacatccatttagggtttagggttaatggtttttatagactaatttttttagtacatctattttattctattttagcctctaaattaagaaaactaaaactctattttagtttttttatttaataatttagatataaaatagaataaaataaagtgactaaaaattaaacaaataccctttaagaaattaaaaaaactaaggaaacatttttcttgtttcgagtagataatgccagcctgttaaacgccgtcgacgagtctaacggacaccaaccagcgaaccagcagcgtcgcgtcgggccaagcgaagcagacggcacggcatctctgtcgctgcctctggacccctctcgagagttccgctccaccgttggacttgctccgctgtcggcatccagaaattgcgtggcggagcggcagacgtgagccggcacggcaggcggcctcctcctcctctcacggcaccggcagctacgggggattcctttcccaccgctccttcgctttcccttcctcgcccgccgtaataaatagacaccccctccacaccctctttccccaacctcgtgttgttcggagcgcacacacacacaaccagatctcccccaaatccacccgtcggcacctccgcttcaaggtacgccgctcgtcctccccccccccccctctctaccttctctagatcggcgttccggtccatggttagggcccggtagttctacttctgttcatgtttgtgttagatccgtgtttgtgttagatccgtgctgctagcgttcgtacacggatgcgacctgtacgtcagacacgttctgattgctaacttgccagtgtttctctttggggaatcctgggatggctctagccgttccgcagacgggatcgatttcatgattttttttgtttcgttgcatagggtttggtttgcccttttcctttatttcaatatatgccgtgcacttgtttgtcgggtcatcttttcatgcttttttttgtcttggttgtgatgatgtggtctggttgggcggtcgttctagatcggagtagaattctgtttcaaactacctggtggatttattaattttggatctgtatgtgtgtgccatacatattcatagttacgaattgaagatgatggatggaaatatcgatctaggataggtatacatgttgatgcgggttttactgatgcatatacagagatgctttttgttcgcttggttgtgatgatgtggtgtggttgggcggtcgttcattcgttctagatcggagtagaatactgtttcaaactacctggtgtatttattaattttggaactgtatgtgtgtgtcatacatcttcatagttacgagtttaagatggatggaaatatcgatctaggataggtatacatgttgatgtgggttttactgatgcatatacatgatggcatatgcagcatctattcatatgctctaaccttgagtacctatctattataataaacaagtatgttttataattattttgatcttgatatacttggatgatggcatatgcagcagctatatgtggatttttttagccctgccttcatacgctatttatttgcttggtactgtttcttttgtcgatgctcaccctgttgtttggtgttacttctgcagggatcaccgatcatgcaaaaactcattaactcagtgcaaaactatgcctggggcagcaaaacggcgttgactgaactttatggtatggaaaatccgtccagccagccgatggccgagctgtggatgggcgcacatccgaaaagcagttcacgagtgcagaatgccgccggagatatcgtttcactgcgtgatgtgattgagagtgataaatcgactctgctcggagaggccgttgccaaacgctttggcgaactgcctttcctgttcaaagtattatgcgcagcacagccactctccattcaggttcatccaaacaaacacaattctgaaatcggttttgccaaagaaaatgccgcaggtatcccgatggatgccgccgagcgtaactataaagatcctaaccacaagccggagctggtttttgcgctgacgcctttccttgcgatgaacgcgtttcgtgaattttccgagattgtctccctactccagccggtcgcaggtgcacatccggcgattgctcactttttacaacagcctgatgccgaacgtttaagcgaactgttcgccagcctgttgaatatgcagggtgaagaaaaatcccgcgcgctggcgattttaaaatcggccctcgatagccagcagggtgaaccgtggcaaacgattcgtttaatttctgaattttacccggaagacagcggtctgttctccccgctattgctgaatgtggtgaaattgaaccctggcgaagcgatgttcctgttcgctgaaacaccgcacgcttacctgcaaggcgtggcgctggaagtgatggcaaactccgataacgtgctgcgtgcgggtctgacgcctaaatacattgatattccggaactggttgccaatgtgaaattcgaagccaaaccggctaaccagttgttgacccagccggtgaaacaaggtgcagaactggacttcccgattccagtggatgattttgccttctcgctgcatgaccttagtgataaagaaaccaccattagccagcagagtgccgccattttgttctgcgtcgaaggcgatgcaacgttgtggaaaggttctcagcagttacagcttaaaccgggtgaatcagcgtttattgccgccaacgaatcaccggtgactgtcaaaggccacggccgtttagcgcgtgtttacaacaagctgtaagagcttactgaaaaaattaacatctcttgctaagctgggagctcgatccgtcgacctgcagatcgttcaaacatttggcaataaagtttcttaagattgaatcctgttgccggtcttgcgatgattatcatataatttctgttgaattacgttaagcatgtaataattaacatgtaatgcatgacgttatttatgagatgggtttttatgattagagtcccgcaattatacatttaatacgcgatagaaaacaaaatatagcgcgcaaactaggataaattatcgcgcgcggtgtcatctatgttactagatccggaccgcctgcaggcccgggggcgcgccctaattagctaacggccaggatcgccgcgtgagcctttagcaactagctagattaattaacgcaatctgttattaagttgtctaagcgtcaatttgtttacaccacaatatatcctgccaccagccagccaacagctccccgaccggcagctcggcacaaaatcaccactcgatacaggcagcccatcagaattaattctcatgtttgacagcttatcatcgactgcacggtgcaccaatgcttctggcgtcaggcagccatcggaagctgtggtatggctgtgcaggtcgtaaatcactgcataattcgtgtcgctcaaggcgcactcccgttctggataatgttttttgcgccgacatcataacggttctggcaaatattctgaaatgagctgttgacaattaatcatccggctcgtataatgtgtggaattgtgagcggataacaatttcacacaggaaacagaccatgagggaagcgttgatcgccgaagtatcgactcaactatcagaggtagttggcgtcatcgagcgccatctcgaaccgacgttgctggccgtacatttgtacggctccgcagtggatggcggcctgaagccacacagtgatattgatttgctggttacggtgaccgtaaggcttgatgaaacaacgcggcgagctttgatcaacgaccttttggaaacttcggcttcccctggagagagcgagattctccgcgctgtagaagtcaccattgttgtgcacgacgacatcattccgtggcgttatccagctaagcgcgaactgcaatttggagaatggcagcgcaatgacattcttgcaggtatcttcgagccagccacgatcgacattgatctggctatcttgctgacaaaagcaagagaacatagcgttgccttggtaggtccagcggcggaggaactctttgatccggttcctgaacaggatctatttgaggcgctaaatgaaaccttaacgctatggaactcgccgcccgactgggctggcgatgagcgaaatgtagtgcttacgttgtcccgcatttggtacagcgcagtaaccggcaaaatcgcgccgaaggatgtcgctgccgactgggcaatggagcgcctgccggcccagtatcagcccgtcatacttgaagctaggcaggcttatcttggacaagaagatcgcttggcctcgcgcgcagatcagttggaagaatttgttcactacgtgaaaggcgagatcaccaaagtagtcggcaaataaagctctagtggatctccgtacccagggatctggctcgcggcggacgcacgacgccggggcgagaccataggcgatctcctaaatcaatagtagctgtaacctcgaagcgtttcacttgtaacaacgattgagaatttttgtcataaaattgaaatacttggttcgcatttttgtcatccgcggtcagccgcaattctgacgaactgcccatttagctggagatgattgtacatccttcacgtgaaaatttctcaagcgctgtgaacaagggttcagattttagattgaaaggtgagccgttgaaacacgttcttcttgtcgatgacgacgtcgctatgcggcatcttattattgaataccttacgatccacgccttcaaagtgaccgcggtagccgacagcacccagttcacaagagtactctcttccgcgacggtcgatgtcgtggttgttgatctagatttaggtcgtgaagatgggctcgagatcgttcgtaatctggcggcaaagtctgatattccaatcataattatcagtggcgaccgccttgaggagacggataaagttgttgcactcgagctaggagcaagtgattttatcgctaagccgttcagtatcagagagtttctagcacgcattcgggttgccttgcgcgtgcgccccaacgttgtccgctccaaagaccgacggtctttttgttttactgactggacacttaatctcaggcaacgtcgcttgatgtccgaagctggcggtgaggtgaaacttacggcaggtgagttcaatcttctcctcgcgtttttagagaaaccccgcgacgttctatcgcgcgagcaacttctcattgccagtcgagtacgcgacgaggaggtttatgacaggagtatagatgttctcattttgaggctgcgccgcaaacttgaggcagatccgtcaagccctcaactgataaaaacagcaagaggtgccggttatttctttgacgcggacgtgcaggtttcgcacggggggacgatggcagcctgagccaattcccagatccccgaggaatcggcgtgagcggtcgcaaaccatccggcccggtacaaatcggcgcggcgctgggtgatgacctggtggagaagttgaaggccgcgcaggccgcccagcggcaacgcatcgaggcagaagcacgccccggtgaatcgtggcaagcggccgctgatcgaatccgcaaagaatcccggcaaccgccggcagccggtgcgccgtcgattaggaagccgcccaagggcgacgagcaaccagattttttcgttccgatgctctatgacgtgggcacccgcgatagtcgcagcatcatggacgtggccgttttccgtctgtcgaagcgtgaccgacgagctggcgaggtgatccgctacgagcttccagacgggcacgtagaggtttccgcagggccggccggcatggccagtgtgtgggattacgacctggtactgatggcggtttcccatctaaccgaatccatgaaccgataccgggaagggaagggagacaagcccggccgcgtgttccgtccacacgttgcggacgtactcaagttctgccggcgagccgatggcggaaagcagaaagacgacctggtagaaacctgcattcggttaaacaccacgcacgttgccatgcagcgtacgaagaaggccaagaacggccgcctggtgacggtatccgagggtgaagccttgattagccgctacaagatcgtaaagagcgaaaccgggcggccggagtacatcgagatcgagctggctgattggatgtaccgcgagatcacagaaggcaagaacccggacgtgctgacggttcaccccgattactttttgatcgatcccggcatcggccgttttctctaccgcctggcacgccgcgccgcaggcaaggcagaagccagatggttgttcaagacgatctacgaacgcagtggcagcgccggagagttcaagaagttctgtttcaccgtgcgcaagctgatcgggtcaaatgacctgccggagtacgatttgaaggaggaggcggggcaggctggcccgatcctagtcatgcgctaccgcaacctgatcgagggcgaagcatccgccggttcctaatgtacggagcagatgctagggcaaattgccctagcaggggaaaaaggtcgaaaaggtctctttcctgtggatagcacgtacattgggaacccaaagccgtacattgggaaccggaacccgtacattgggaacccaaagccgtacattgggaaccggtcacacatgtaagtgactgatataaaagagaaaaaaggcgatttttccgcctaaaactctttaaaacttattaaaactcttaaaacccgcctggcctgtgcataactgtctggccagcgcacagccgaagagctgcaaaaagcgcctacccttcggtcgctgcgctccctacgccccgccgcttcgcgtcggcctatcgcggccgctggccgctcaaaaatggctggcctacggccaggcaatctaccagggcgcggacaagccgcgccgtcgccactcgaccgccggcgctgaggtctgcctcgtgaagaaggtgttgctgactcataccaggcctgaatcgccccatcatccagccagaaagtgagggagccacggttgatgagagctttgttgtaggtggaccagttggtgattttgaacttttgctttgccacggaacggtctgcgttgtcgggaagatgcgtgatctgatccttcaactcagcaaaagttcgatttattcaacaaagccgccgtcccgtcaagtcagcgtaatgctctgccagtgttacaaccaattaaccaattctgattagaaaaactcatcgagcatcaaatgaaactgcaatttattcatatcaggattatcaataccatatttttgaaaaagccgtttctgtaatgaaggagaaaactcaccgaggcagttccataggatggcaagatcctggtatcggtctgcgattccgactcgtccaacatcaatacaacctattaatttcccctcgtcaaaaataaggttatcaagtgagaaatcaccatgagtgacgactgaatccggtgagaatggcaaaagctctgcattaatgaatcggccaacgcgcggggagaggcggtttgcgtattgggcgctcttccgcttcctcgctcactgactcgctgcgctcggtcgttcggctgcggcgagcggtatcagctcactcaaaggcggtaatacggttatccacagaatcaggggataacgcaggaaagaacatgtgagcaaaaggccagcaaaaggccaggaaccgtaaaaaggccgcgttgctggcgtttttccataggctccgcccccctgacgagcatcacaaaaatcgacgctcaagtcagaggtggcgaaacccgacaggactataaagataccaggcgtttccccctggaagctccctcgtgcgctctcctgttccgaccctgccgcttaccggatacctgtccgcctttctcccttcgggaagcgtggcgctttctcatagctcacgctgtaggtatctcagttcggtgtaggtcgttcgctccaagctgggctgtgtgcacgaaccccccgttcagcccgaccgctgcgccttatccggtaactatcgtcttgagtccaacccggtaagacacgacttatcgccactggcagcagccactggtaacaggattagcagagcgaggtatgtaggcggtgctacagagttcttgaagtggtggcctaactacggctacactagaagaacagtatttggtatctgcgctctgctgaagccagttaccttcggaaaaagagttggtagctcttgatccggcaaacaaaccaccgctggtagcggtggtttttttgtttgcaagcagcagattacgcgcagaaaaaaaggatctcaagaagatcctttgatcttttctacggggtctgacgctcagtggaacgaaaactcacgttaagggattttggtcatgagattatcaaaaaggatcttcacctagatccttttgatccggaatta

SEQ ID NO: 123 - DNA, 17531 bp, synthetic construct
  source 1..17531: mol_type = other DNA
attcctgtggttggcatgcacatacaaatggacgaacggataaaccttttcacgcccttttaaatatccgattattctaataaacgctcttttctcttaggtttacccgccaatatatcctgtcaaacactgatagtttaaactggcactagcctaacggtgttgactaactaggccgcttccctaattagctaacccgggggcgcgccgggaccggaattcattatgtggtctaggtaggttctatatataagaaaacttgaaatgttctaaaaaaaaattcaagcccatgcatgattgaagcaaacggtatagcaacggtgttaacctgatctagtgatctcttgcaatccttaacggccacctaccgcaggtagcaaacggcgtccccctcctcgatatctccgcggcgacctctggctttttccgcggaattgcgcggtggggacggattccacgagaccgcgacgcaaccgcctctcgccgctgggccccacaccgctcggtgccgtagcctcacgggactctttctccctcctcccccgttataaattggcttcatcccctccttgcctcatccatccaaatcccagtccccaatcccatcccttcgtaggagaaattcatcgaagctaagcgaatcctcgcgatcctctcaaggtactgcgagttttcgatccccctctcgacccctcgtatgtttgtgtttgtcgtagcgtttgattaggtatgctttccctgtttgtgttcgtcgtagcgtttgattaggtatgctttccctgttcgtgttcatcgtagtgtttgattaggtcgtgtgaggcgatggcctgctcgcgtccttcgatctgtagtcgatttgcgggtcgtggtgtagatctgcgggctgtgatgaagttatttggtgtgatctgctcgcctgattctgcgggttggctcgagtagatatgatggttggaccggttggttcgtttaccgcgctagggttgggctgggatgatgttgcatgcgccgttgcgcgtgatcccgcagcaggacttgcgtttgattgccagatctcgttacgattatgtgatttggtttggactttttagatctgtagcttctgcttatgtgccagatgcgcctactgctcatatgcctgatgataatcataaatggctgtggaactaactagttgattgcggagtcatgtatcagctacaggtgtagggactagctacaggtgtagggacttgcgtctaattgtttggtcctttactcatgttgcaattatgcaatttagtttagattgtttgttccactcatctaggctgtaaaagggacactgcttagattgctgtttaatctttttagtagattatattatattggtaacttattacccctattacatgccatacgtgacttctgctcatgcctgatgataatcatagatcactgtggaattaattagttgattgttgaatcatgtttcatgtacataccacggcacaattgcttagttccttaacaaatgcaaattttactgatccatgtatgatttgcgtggttctctaatgtgaaatactatagctacttgttagtaagaatcaggttcgtatgcttaatgctgtatgtgccttctgctcatgcctgatgataatcatatatcactggaattaattagttgatcgtttaatcatatatcaagtacataccatgccacaatttttagtcacttaacccatgcagattgaactggtccctgcatgttttgctaaattgttctattctgattagaccatatatcatgtatttttttttggtaatggttctcttattttaaatgctatatagttctggtacttgttagaaagatctgcttcatagtttagttgcctatccctcgaattaggatgctgagcagctgatcctatagctttgtttcatgtatcaattcttttgtgttcaacagtcagtttttgttagattcattgtaacttatggtcgcttactcttctggtcctcaatgcttgcagggatcccctaaatagaccatgccgaagaagaagcgcaaggtcgggggcgggggctcaggcgggggcgggagcggcggcgggggctctgggggcggcggcagcggcgggggcggcagcgggggcggcgggtcgatgctgttccaggatttcactcatctgtaccctctctcaaagactgttcggttcgagctcaagcctattgggcggactctggagcacatccacgcgaagaacttcctcagccaggacgaaaccatggccgacatgtaccagaaggtcaaggtcatcctcgacgactaccacagggacttcatcgcggacatgatgggcgaggtgaagctgacgaagctcgccgagttctacgacgtctacctcaagttccgcaagaacccgaaggacgacggcctccagaagcagctcaaggacctgcaggccgtcctgaggaaggagtccgtcaagcccatcggcagcggcggcaagtacaagaccggctacgacaggctgttcggcgccaagctgttcaaggacggcaaggagctcggcgacctggcgaagttcgtgatcgcgcaggagggcgagagctcccccaagctggcccacctggcccacttcgagaagttcagcacgtacttcaccggcttccacgacaacaggaagaacatgtacagcgacgaggacaagcacacggccatcgcctaccgcctcatccacgagaacctgccccgcttcatcgacaacctgcagatcctgacgaccatcaagcagaagcactccgccctgtacgaccagatcatcaacgagctcaccgcgagcggcctcgacgtgtccctcgccagccacctcgacggctaccacaagctcctgacccaggagggcatcaccgcctacaaccgcatcatcggcgaggtgaacggctacaccaacaagcacaaccagatctgccacaagtccgagaggatcgccaagctcaggcccctgcacaagcagatcctcagcgacggcatgggcgtgagcttcctcccgtccaagttcgccgacgactccgagatgtgccaggccgtgaacgagttctacaggcactacaccgacgtgttcgccaaggtgcagtccctgttcgacggcttcgacgaccaccagaaggacggcatctacgtggagcacaagaacctgaacgagctgtccaagcaggccttcggcgactgggccctcctgggccgcgtgctggacggctactacgtggacgtcgtgaacccggagttcaacgagcgcttcgcgaaggcgaagacggacaacgcgaaggccaagctcaccaaggagaaggacaagttcatcaagggcgtccacagcctcgcgtccctggagcaggcgatcgagcaccacaccgcgcgccacgacgacgagtccgtgcaggccggcaagctcggccagtacttcaagcacggcctggccggcgtcgacaacccgatccagaagatccacaacaaccactccaccatcaagggcttcctggagagggagcgcccggcgggcgagcgcgcgctccccaagatcaagtccggcaagaaccccgagatgacgcagctcaggcagctgaaggagctgctcgacaacgcgctcaacgtggcgcacttcgccaagctgctcacgaccaagaccacgctggacaaccaggacggcaacttctacggcgagttcggcgtcctgtacgacgagctggcgaagatcccgaccctgtacaacaaggtccgcgactacctgagccagaagcccttctccaccgagaagtacaagctcaacttcggcaacccgaccctcctgaacggctgggacctcaacaaggagaaggacaacttcggcgtgatcctccagaaggacggctgctactacctcgccctgctggacaaggcgcacaagaaggtcttcgacaacgccccgaacaccggcaagaacgtgtaccagaagatggtgtacaagctgctccccggccccaacaagatgctgccgaaggtgttcttcgcgaagtccaacctcgactactacaaccccagcgccgagctcctggacaagtacgccaagggcacgcacaagaagggcgacaacttcaacctcaaggactgccacgcgctgatcgacttcttcaaggcgggcatcaacaagcaccccgagtggcagcacttcggcttcaagttcagcccgacctccagctacagggacctcagcgacttctaccgcgaggtggagccccagggctaccaggtgaagttcgtcgacatcaacgccgactacatcgacgagctcgtcgagcagggcaagctctacctgttccagatctacaacaaggacttctccccgaaggcccacggcaagccgaacctccacacgctctacttcaaggccctcttcagcgaggacaacctggccgacccgatctacaagctcaacggcgaggcgcagatcttctaccgcaaggccagcctggacatgaacgaaacgaccatccacagggccggcgaggtcctggccaacaagaacccggacaacccgaagaagaggcagttcgtctacgacatcatcaaggacaagaggtacacccaggacaagttcatgctccacgtcccgatcaccatgaacttcggcgtccagggcatgaccatcaaggagttcaacaagaaggtcaaccagagcatccagcagtacgacgaggtgaacgtcatcggcatcgaccgcggcgagaggcacctgctctacctgacggtcatcaactccaagggcgagatcctcgagcagcgcagcctgaacgacatcacgaccgcgagcgccaacggcacgcaggtcaccacgccgtaccacaagatcctcgacaagcgcgagatcgagaggctgaacgcgcgcaagggctggggcgagatcgaaacgatcaaggagctcaagtccggctacctcagccacgtcgtgcaccagatcaaccagctcatgctgaagtacaacgcgatcgtggtcctcgaggacctgaacttcggcttcaagaggggccgcttcaaggtggagaagcagatctaccagaacttcgagaacgccctgatcaagaagctcaaccacctggtcctcaaggacaaggcggacgacgagatcggcagctacaagaacgcgctccagctgaccaacaacttcacggacctcaagtccatcggcaagcagacgggcttcctgttctacgtgccggcgtggaacacctccaagatcgacccggaaaccggcttcgtcgacctgctcaagccgcgctacgagaacatcgcgcagtcccaggcgttcttcggcaagttcgacaagatctgctacaacaccgacaagggctacttcgagttccacatcgactacgcgaagttcaccgacaaggccaagaactccaggcagaagtgggccatctgcagccacggcgacaagcgctacgtgtacgacaagacggcgaaccagaacaagggcgcggccaagggcatcaacgtgaacgacgagctgaagtccctcttcgcgcgctaccacatcaacgacaagcagccgaacctcgtcatggacatctgccagaacaacgacaaggagttccacaagagcctgatgtgcctgctcaagaccctgctcgccctccgctactccaacgcgagctccgacgaggacttcatcctcagccccgtcgcgaacgacgagggcgtgttcttcaactccgccctcgcggacgacacgcagccgcagaacgccgacgcgaacggcgcctaccacatcgccctcaagggcctgtggctgctcaacgagctcaagaactccgacgacctgaacaaggtgaagctcgccattgacaaccagacgtggctgaatttcgctcagaatagggggggcgggggctcaggcgggggcgggagcggcggcgggggctctgggggcggcggcagcggcgggggcggcagcgggggcggcgggtcgccgaagaagaagcgcaaggtgtccggcggcagctccggcggcagcccgaagaagaagcgcaaagtgtgagggacccgatcgttcaaacatttggcaataaagtttcttaagattgaatcctgttgccggtcttgcgatgattatcatataatttctgttgaattacgttaagcatgtaataattaacatgtaatgcatgacgttatttatgagatgggtttttatgattagagtcccgcaattatacatttaatacgcgatagaaaacaaaatatagcgcgcaaactaggataaattatcgcgcgcggtgtcatctatgttactagatcggtaccgaattcattatgtggtctaggtaggttctatatataagaaaacttgaaatgttctaaaaaaaaattcaagcccatgcatgattgaagcaaacggtatagcaacggtgttaacctgatctagtgatctcttgcaatccttaacggccacctaccgcaggtagcaaacggcgtccccctcctcgatatctccgcggcgacctctggctttttccgcggaattgcgcggtggggacggattccacgagaccgcgacgcaaccgcctctcgccgctgggccccacaccgctcggtgccgtagcctcacgggactctttctccctcctcccccgttataaattggcttcatcccctccttgcctcatccatccaaatcccagtccccaatcccatcccttcgtaggagaaattcatcgaagctaagcgaatcctcgcgatcctctcaaggtactgcgagttttcgatccccctctcgacccctcgtatgtttgtgtttgtcgtagcgtttgattaggtatgctttccctgtttgtgttcgtcgtagcgtttgattaggtatgctttccctgttcgtgttcatcgtagtgtttgattaggtcgtgtgaggcgatggcctgctcgcgtccttcgatctgtagtcgatttgcgggtcgtggtgtagatctgcgggctgtgatgaagttatttggtgtgatctgctcgcctgattctgcgggttggctcgagtagatatgatggttggaccggttggttcgtttaccgcgctagggttgggctgggatgatgttgcatgcgccgttgcgcgtgatcccgcagcaggacttgcgtttgattgccagatctcgttacgattatgtgatttggtttggactttttagatctgtagcttctgcttatgtgccagatgcgcctactgctcatatgcctgatgataatcataaatggctgtggaactaactagttgattgcggagtcatgtatcagctacaggtgtagggactagctacaggtgtagggacttgcgtctaattgtttggtcctttactcatgttgcaattatgcaatttagtttagattgtttgttccactcatctaggctgtaaaagggacactgcttagattgctgtttaatctttttagtagattatattatattggtaacttattacccctattacatgccatacgtgacttctgctcatgcctgatgataatcatagatcactgtggaattaattagttgattgttgaatcatgtttcatgtacataccacggcacaattgcttagttccttaacaaatgcaaattttactgatccatgtatgatttgcgtggttctctaatgtgaaatactatagctacttgttagtaagaatcaggttcgtatgcttaatgctgtatgtgccttctgctcatgcctgatgataatcatatatcactggaattaattagttgatcgtttaatcatatatcaagtacataccatgccacaatttttagtcacttaacccatgcagattgaactggtccctgcatgttttgctaaattgttctattctgattagaccatatatcatgtatttttttttggtaatggttctcttattttaaatgctatatagttctggtacttgttagaaagatctgcttcatagtttagttgcctatccctcgaattaggatgctgagcagctgatcctatagctttgtttcatgtatcaattcttttgtgttcaacagtcagtttttgttagattcattgtaacttatggtcgcttactcttctggtcctcaatgcttgcagaagcttgaaattctgatgagtccgtgaggacgaaacgagtaagctcgtcaatttctactgtttgtagatgggaaagaccgaggagaagatctaatttctactgtttgtagatgcaccaaggaaggggaggagatcaatttctactgtttgtagatgtcacagatcacaaacttcaaatgaatttctactgtttgtagatacgcccagaaagcatacgcagtcggccggcatggtcccagcctcctcgctggcgccggctgggcaacatgcttcggcatggcgaatgggacgatcgttcaaacatttggcaataaagtttcttaagattgaatcctgttgccggtcttgcgatgattatcatataatttctgttgaattacgttaagcatgtaataattaacatgtaatgcatgacgttatttatgagatgggtttttatgattagagtcccgcaattatacatttaatacgcgatagaaaacaaaatatagcgcgcaaactaggataaattatcgcgcgcggtgtcatctatgttactagatccctaggctgcagtgcagcgtgacccggtcgtgcccctctctagagataatgagcattgcatgtctaagttataaaaaattaccacatattttttttgtcacacttgtttgaagtgcagtttatctatctttatacatatatttaaactttactctacgaataatataatctatagtactacaataatatcagtgttttagagaatcatataaatgaacagttagacatggtctaaaggacaattgagtattttgacaacaggactctacagttttatctttttagtgtgcatgtgttctcctttttttttgcaaatagcttcacctatataatacttcatccattttattagtacatccatttagggtttagggttaatggtttttatagactaatttttttagtacatctattttattctattttagcctctaaattaagaaaactaaaactctattttagtttttttatttaataatttagatataaaatagaataaaataaagtgactaaaaattaaacaaataccctttaagaaattaaaaaaactaaggaaacatttttcttgtttcgagtagataatgccagcctgttaaacgccgtcgacgagtctaacggacaccaaccagcgaaccagcagcgtcgcgtcgggccaagcgaagcagacggcacggcatctctgtcgctgcctctggacccctctcgagagttccgctccaccgttggacttgctccgctgtcggcatccagaaattgcgtggcggagcggcagacgtgagccggcacggcaggcggcctcctcctcctctcacggcaccggcagctacgggggattcctttcccaccgctccttcgctttcccttcctcgcccgccgtaataaatagacaccccctccacaccctctttccccaacctcgtgttgttcggagcgcacacacacacaaccagatctcccccaaatccacccgtcggcacctccgcttcaaggtacgccgctcgtcctccccccccccccctctctaccttctctagatcggcgttccggtccatggttagggcccggtagttctacttctgttcatgtttgtgttagatccgtgtttgtgttagatccgtgctgctagcgttcgtacacggatgcgacctgtacgtcagacacgttctgattgctaacttgccagtgtttctctttggggaatcctgggatggctctagccgttccgcagacgggatcgatttcatgattttttttgtttcgttgcatagggtttggtttgcccttttcctttatttcaatatatgccgtgcacttgtttgtcgggtcatcttttcatgcttttttttgtcttggttgtgatgatgtggtctggttgggcggtcgttctagatcggagtagaattctgtttcaaactacctggtggatttattaattttggatctgtatgtgtgtgccatacatattcatagttacgaattgaagatgatggatggaaatatcgatctaggataggtatacatgttgatgcgggttttactgatgcatatacagagatgctttttgttcgcttggttgtgatgatgtggtgtggttgggcggtcgttcattcgttctagatcggagtagaatactgtttcaaactacctggtgtatttattaattttggaactgtatgtgtgtgtcatacatcttcatagttacgagtttaagatggatggaaatatcgatctaggataggtatacatgttgatgtgggttttactgatgcatatacatgatggcatatgcagcatctattcatatgctctaaccttgagtacctatctattataataaacaagtatgttttataattattttgatcttgatatacttggatgatggcatatgcagcagctatatgtggatttttttagccctgccttcatacgctatttatttgcttggtactgtttcttttgtcgatgctcaccctgttgtttggtgttacttctgcagggatcaccgatcatgcaaaaactcattaactcagtgcaaaactatgcctggggcagcaaaacggcgttgactgaactttatggtatggaaaatccgtccagccagccgatggccgagctgtggatgggcgcacatccgaaaagcagttcacgagtgcagaatgccgccggagatatcgtttcactgcgtgatgtgattgagagtgataaatcgactctgctcggagaggccgttgccaaacgctttggcgaactgcctttcctgttcaaagtattatgcgcagcacagccactctccattcaggttcatccaaacaaacacaattctgaaatcggttttgccaaagaaaatgccgcaggtatcccgatggatgccgccgagcgtaactataaagatcctaaccacaagccggagctggtttttgcgctgacgcctttccttgcgatgaacgcgtttcgtgaattttccgagattgtctccctactccagccggtcgcaggtgcacatccggcgattgctcactttttacaacagcctgatgccgaacgtttaagcgaactgttcgccagcctgttgaatatgcagggtgaagaaaaatcccgcgcgctggcgattttaaaatcggccctcgatagccagcagggtgaaccgtggcaaacgattcgtttaatttctgaattttacccggaagacagcggtctgttctccccgctattgctgaatgtggtgaaattgaaccctggcgaagcgatgttcctgttcgctgaaacaccgcacgcttacctgcaaggcgtggcgctggaagtgatggcaaactccgataacgtgctgcgtgcgggtctgacgcctaaatacattgatattccggaactggttgccaatgtgaaattcgaagccaaaccggctaaccagttgttgacccagccggtgaaacaaggtgcagaactggacttcccgattccagtggatgattttgccttctcgctgcatgaccttagtgataaagaaaccaccattagccagcagagtgccgccattttgttctgcgtcgaaggcgatgcaacgttgtggaaaggttctcagcagttacagcttaaaccgggtgaatcagcgtttattgccgccaacgaatcaccggtgactgtcaaaggccacggccgtttagcgcgtgtttacaacaagctgtaagagcttactgaaaaaattaacatctcttgctaagctgggagctcgatccgtcgacctgcagatcgttcaaacatttggcaataaagtttcttaagattgaatcctgttgccggtcttgcgatgattatcatataatttctgttgaattacgttaagcatgtaataattaacatgtaatgcatgacgttatttatgagatgggtttttatgattagagtcccgcaattatacatttaatacgcgatagaaaacaaaatatagcgcgcaaactaggataaattatcgcgcgcggtgtcatctatgttactagatccggaccgcctgcaggcccgggggcgcgccctaattagctaacggccaggatcgccgcgtgagcctttagcaactagctagattaattaacgcaatctgttattaagttgtctaagcgtcaatttgtttacaccacaatatatcctgccaccagccagccaacagctccccgaccggcagctcggcacaaaatcaccactcgatacaggcagcccatcagaattaattctcatgtttgacagcttatcatcgactgcacggtgcaccaatgcttctggcgtcaggcagccatcggaagctgtggtatggctgtgcaggtcgtaaatcactgcataattcgtgtcgctcaaggcgcactcccgttctggataatgttttttgcgccgacatcataacggttctggcaaatattctgaaatgagctgttgacaattaatcatccggctcgtataatgtgtggaattgtgagcggataacaatttcacacaggaaacagaccatgagggaagcgttgatcgccgaagtatcgactcaactatcagaggtagttggcgtcatcgagcgccatctcgaaccgacgttgctggccgtacatttgtacggctccgcagtggatggcggcctgaagccacacagtgatattgatttgctggttacggtgaccgtaaggcttgatgaaacaacgcggcgagctttgatcaacgaccttttggaaacttcggcttcccctggagagagcgagattctccgcgctgtagaagtcaccattgttgtgcacgacgacatcattccgtggcgttatccagctaagcgcgaactgcaatttggagaatggcagcgcaatgacattcttgcaggtatcttcgagccagccacgatcgacattgatctggctatcttgctgacaaaagcaagagaacatagcgttgccttggtaggtccagcggcggaggaactctttgatccggttcctgaacaggatctatttgaggcgctaaatgaaaccttaacgctatggaactcgccgcccgactgggctggcgatgagcgaaatgtagtgcttacgttgtcccgcatttggtacagcgcagtaaccggcaaaatcgcgccgaaggatgtcgctgccgactgggcaatggagcgcctgccggcccagtatcagcccgtcatacttgaagctaggcaggcttatcttggacaagaagatcgcttggcctcgcgcgcagatcagttggaagaatttgttcactacgtgaaaggcgagatcaccaaagtagtcggcaaataaagctctagtggatctccgtacccagggatctggctcgcggcggacgcacgacgccggggcgagaccataggcgatctcctaaatcaatagtagctgtaacctcgaagcgtttcacttgtaacaacgattgagaatttttgtcataaaattgaaatacttggttcgcatttttgtcatccgcggtcagccgcaattctgacgaactgcccatttagctggagatgattgtacatccttcacgtgaaaatttctcaagcgctgtgaacaagggttcagattttagattgaaaggtgagccgttgaaacacgttcttcttgtcgatgacgacgtcgctatgcggcatcttattattgaataccttacgatccacgccttcaaagtgaccgcggtagccgacagcacccagttcacaagagtactctcttccgcgacggtcgatgtcgtggttgttgatctagatttaggtcgtgaagatgggctcgagatcgttcgtaatctggcggcaaagtctgatattccaatcataattatcagtggcgaccgccttgaggagacggataaagttgttgcactcgagctaggagcaagtgattttatcgctaagccgttcagtatcagagagtttctagcacgcattcgggttgccttgcgcgtgcgccccaacgttgtccgctccaaagaccgacggtctttttgttttactgactggacacttaatctcaggcaacgtcgcttgatgtccgaagctggcggtgaggtgaaacttacggcaggtgagttcaatcttctcctcgcgtttttagagaaaccccgcgacgttctatcgcgcgagcaacttctcattgccagtcgagtacgcgacgaggaggtttatgacaggagtatagatgttctcattttgaggctgcgccgcaaacttgaggcagatccgtcaagccctcaactgataaaaacagcaagaggtgccggttatttctttgacgcggacgtgcaggtttcgcacggggggacgatggcagcctgagccaattcccagatccccgaggaatcggcgtgagcggtcgcaaaccatccggcccggtacaaatcggcgcggcgctgggtgatgacctggtggagaagttgaaggccgcgcaggccgcccagcggcaacgcatcgaggcagaagcacgccccggtgaatcgtggcaagcggccgctgatcgaatccgcaaagaatcccggcaaccgccggcagccggtgcgccgtcgattaggaagccgcccaagggcgacgagcaaccagattttttcgttccgatgctctatgacgtgggcacccgcgatagtcgcagcatcatggacgtggccgttttccgtctgtcgaagcgtgaccgacgagctggcgaggtgatccgctacgagcttccagacgggcacgtagaggtttccgcagggccggccggcatggccagtgtgtgggattacgacctggtactgatggcggtttcccatctaaccgaatccatgaaccgataccgggaagggaagggagacaagcccggccgcgtgttccgtccacacgttgcggacgtactcaagttctgccggcgagccgatggcggaaagcagaaagacgacctggtagaaacctgcattcggttaaacaccacgcacgttgccatgcagcgtacgaagaaggccaagaacggccgcctggtgacggtatccgagggtgaagccttgattagccgctacaagatcgtaaagagcgaaaccgggcggccggagtacatcgagatcgagctggctgattggatgtaccgcgagatcacagaaggcaagaacccggacgtgctgacggttcaccccgattactttttgatcgatcccggcatcggccgttttctctaccgcctggcacgccgcgccgcaggcaaggcagaagccagatggttgttcaagacgatctacgaacgcagtggcagcgccggagagttcaagaagttctgtttcaccgtgcgcaagctgatcgggtcaaatgacctgccggagtacgatttgaaggaggaggcggggcaggctggcccgatcctagtcatgcgctaccgcaacctgatcgagggcgaagcatccgccggttcctaatgtacggagcagatgctagggcaaattgccctagcaggggaaaaaggtcgaaaaggtctctttcctgtggatagcacgtacattgggaacccaaagccgtacattgggaaccggaacccgtacattgggaacccaaagccgtacattgggaaccggtcacacatgtaagtgactgatataaaagagaaaaaaggcgatttttccgcctaaaactctttaaaacttattaaaactcttaaaacccgcctggcctgtgcataactgtctggccagcgcacagccgaagagctgcaaaaagcgcctacccttcggtcgctgcgctccctacgccccgccgcttcgcgtcggcctatcgcggccgctggccgctcaaaaatggctggcctacggccaggcaatctaccagggcgcggacaagccgcgccgtcgccactcgaccgccggcgctgaggtctgcctcgtgaagaaggtgttgctgactcataccaggcctgaatcgccccatcatccagccagaaagtgagggagccacggttgatgagagctttgttgtaggtggaccagttggtgattttgaacttttgctttgccacggaacggtctgcgttgtcgggaagatgcgtgatctgatccttcaactcagcaaaagttcgatttattcaacaaagccgccgtcccgtcaagtcagcgtaatgctctgccagtgttacaaccaattaaccaattctgattagaaaaactcatcgagcatcaaatgaaactgcaatttattcatatcaggattatcaataccatatttttgaaaaagccgtttctgtaatgaaggagaaaactcaccgaggcagttccataggatggcaagatcctggtatcggtctgcgattccgactcgtccaacatcaatacaacctattaatttcccctcgtcaaaaataaggttatcaagtgagaaatcaccatgagtgacgactgaatccggtgagaatggcaaaagctctgcattaatgaatcggccaacgcgcggggagaggcggtttgcgtattgggcgctcttccgcttcctcgctcactgactcgctgcgctcggtcgttcggctgcggcgagcggtatcagctcactcaaaggcggtaatacggttatccacagaatcaggggataacgcaggaaagaacatgtgagcaaaaggccagcaaaaggccaggaaccgtaaaaaggccgcgttgctggcgtttttccataggctccgcccccctgacgagcatcacaaaaatcgacgctcaagtcagaggtggcgaaacccgacaggactataaagataccaggcgtttccccctggaagctccctcgtgcgctctcctgttccgaccctgccgcttaccggatacctgtccgcctttctcccttcgggaagcgtggcgctttctcatagctcacgctgtaggtatctcagttcggtgtaggtcgttcgctccaagctgggctgtgtgcacgaaccccccgttcagcccgaccgctgcgccttatccggtaactatcgtcttgagtccaacccggtaagacacgacttatcgccactggcagcagccactggtaacaggattagcagagcgaggtatgtaggcggtgctacagagttcttgaagtggtggcctaactacggctacactagaagaacagtatttggtatctgcgctctgctgaagccagttaccttcggaaaaagagttggtagctcttgatccggcaaacaaaccaccgctggtagcggtggtttttttgtttgcaagcagcagattacgcgcagaaaaaaaggatctcaagaagatcctttgatcttttctacggggtctgacgctcagtggaacgaaaactcacgttaagggattttggtcatgagattatcaaaaaggatcttcacctagatccttttgatccggaatta

SEQ ID NO: 124 - DNA, 17531 bp, synthetic construct
  source 1..17531: mol_type = other DNA
attcctgtggttggcatgcacatacaaatggacgaacggataaaccttttcacgcccttttaaatatccgattattctaataaacgctcttttctcttaggtttacccgccaatatatcctgtcaaacactgatagtttaaactggcactagcctaacggtgttgactaactaggccgcttccctaattagctaacccgggggcgcgccgggaccggaattcattatgtggtctaggtaggttctatatataagaaaacttgaaatgttctaaaaaaaaattcaagcccatgcatgattgaagcaaacggtatagcaacggtgttaacctgatctagtgatctcttgcaatccttaacggccacctaccgcaggtagcaaacggcgtccccctcctcgatatctccgcggcgacctctggctttttccgcggaattgcgcggtggggacggattccacgagaccgcgacgcaaccgcctctcgccgctgggccccacaccgctcggtgccgtagcctcacgggactctttctccctcctcccccgttataaattggcttcatcccctccttgcctcatccatccaaatcccagtccccaatcccatcccttcgtaggagaaattcatcgaagctaagcgaatcctcgcgatcctctcaaggtactgcgagttttcgatccccctctcgacccctcgtatgtttgtgtttgtcgtagcgtttgattaggtatgctttccctgtttgtgttcgtcgtagcgtttgattaggtatgctttccctgttcgtgttcatcgtagtgtttgattaggtcgtgtgaggcgatggcctgctcgcgtccttcgatctgtagtcgatttgcgggtcgtggtgtagatctgcgggctgtgatgaagttatttggtgtgatctgctcgcctgattctgcgggttggctcgagtagatatgatggttggaccggttggttcgtttaccgcgctagggttgggctgggatgatgttgcatgcgccgttgcgcgtgatcccgcagcaggacttgcgtttgattgccagatctcgttacgattatgtgatttggtttggactttttagatctgtagcttctgcttatgtgccagatgcgcctactgctcatatgcctgatgataatcataaatggctgtggaactaactagttgattgcggagtcatgtatcagctacaggtgtagggactagctacaggtgtagggacttgcgtctaattgtttggtcctttactcatgttgcaattatgcaatttagtttagattgtttgttccactcatctaggctgtaaaagggacactgcttagattgctgtttaatctttttagtagattatattatattggtaacttattacccctattacatgccatacgtgacttctgctcatgcctgatgataatcatagatcactgtggaattaattagttgattgttgaatcatgtttcatgtacataccacggcacaattgcttagttccttaacaaatgcaaattttactgatccatgtatgatttgcgtggttctctaatgtgaaatactatagctacttgttagtaagaatcaggttcgtatgcttaatgctgtatgtgccttctgctcatgcctgatgataatcatatatcactggaattaattagttgatcgtttaatcatatatcaagtacataccatgccacaatttttagtcacttaacccatgcagattgaactggtccctgcatgttttgctaaattgttctattctgattagaccatatatcatgtatttttttttggtaatggttctcttattttaaatgctatatagttctggtacttgttagaaagatctgcttcatagtttagttgcctatccctcgaattaggatgctgagcagctgatcctatagctttgtttcatgtatcaattcttttgtgttcaacagtcagtttttgttagattcattgtaacttatggtcgcttactcttctggtcctcaatgcttgcagggatcccctaaatagaccatgccgaagaagaagcgcaaggtcgggggcgggggctcaggcgggggcgggagcggcggcgggggctctgggggcggcggcagcggcgggggcggcagcgggggcggcgggtcgatgctgttccaggatttcactcatctgtaccctctctcaaagactgttcggttcgagctcaagcctattgggcggactctggagcacatccacgcgaagaacttcctcagccaggacgaaaccatggccgacatgtaccagaaggtcaaggtcatcctcgacgactaccacagggacttcatcgcggacatgatgggcgaggtgaagctgacgaagctcgccgagttctacgacgtctacctcaagttccgcaagaacccgaaggacgacggcctccagaagcagctcaaggacctgcaggccgtcctgaggaaggagtccgtcaagcccatcggcagcggcggcaagtacaagaccggctacgacaggctgttcggcgccaagctgttcaaggacggcaaggagctcggcgacctggcgaagttcgtgatcgcgcaggagggcgagagctcccccaagctggcccacctggcccacttcgagaagttcagcacgtacttcaccggcttccacaggaacaggaagaacatgtacagcgacgaggacaagcacacggccatcgcctaccgcctcatccacgagaacctgccccgcttcatcgacaacctgcagatcctgacgaccatcaagcagaagcactccgccctgtacgaccagatcatcaacgagctcaccgcgagcggcctcgacgtgtccctcgccagccacctcgacggctaccacaagctcctgacccaggagggcatcaccgcctacaaccgcatcatcggcgaggtgaacggctacaccaacaagcacaaccagatctgccacaagtccgagaggatcgccaagctcaggcccctgcacaagcagatcctcagcgacggcatgggcgtgagcttcctcccgtccaagttcgccgacgactccgagatgtgccaggccgtgaacgagttctacaggcactacaccgacgtgttcgccaaggtgcagtccctgttcgacggcttcgacgaccaccagaaggacggcatctacgtggagcacaagaacctgaacgagctgtccaagcaggccttcggcgactgggccctcctgggccgcgtgctggacggctactacgtggacgtcgtgaacccggagttcaacgagcgcttcgcgaaggcgaagacggacaacgcgaaggccaagctcaccaaggagaaggacaagttcatcaagggcgtccacagcctcgcgtccctggagcaggcgatcgagcaccacaccgcgcgccacgacgacgagtccgtgcaggccggcaagctcggccagtacttcaagcacggcctggccggcgtcgacaacccgatccagaagatccacaacaaccactccaccatcaagggcttcctggagagggagcgcccggcgggcgagcgcgcgctccccaagatcaagtccggcaagaaccccgagatgacgcagctcaggcagctgaaggagctgctcgacaacgcgctcaacgtggcgcacttcgccaagctgctcacgaccaagaccacgctggacaaccaggacggcaacttctacggcgagttcggcgtcctgtacgacgagctggcgaagatcccgaccctgtacaacaaggtccgcgactacctgagccagaagcccttctccaccgagaagtacaagctcaacttcggcaacccgaccctcctgaacggctgggacctcaacaaggagaaggacaacttcggcgtgatcctccagaaggacggctgctactacctcgccctgctggacaaggcgcacaagaaggtcttcgacaacgccccgaacaccggcaagaacgtgtaccagaagatggtgtacaagctgctccccggccccaacaagatgctgccgaaggtgttcttcgcgaagtccaacctcgactactacaaccccagcgccgagctcctggacaagtacgccaagggcacgcacaagaagggcgacaacttcaacctcaaggactgccacgcgctgatcgacttcttcaaggcgggcatcaacaagcaccccgagtggcagcacttcggcttcaagttcagcccgacctccagctacagggacctcagcgacttctaccgcgaggtggagccccagggctaccaggtgaagttcgtcgacatcaacgccgactacatcgacgagctcgtcgagcagggcaagctctacctgttccagatctacaacaaggacttctccccgaaggcccacggcaagccgaacctccacacgctctacttcaaggccctcttcagcgaggacaacctggccgacccgatctacaagctcaacggcgaggcgcagatcttctaccgcaaggccagcctggacatgaacgaaacgaccatccacagggccggcgaggtcctggccaacaagaacccggacaacccgaagaagaggcagttcgtctacgacatcatcaaggacaagaggtacacccaggacaagttcatgctccacgtcccgatcaccatgaacttcggcgtccagggcatgaccatcaaggagttcaacaagaaggtcaaccagagcatccagcagtacgacgaggtgaacgtcatcggcatcgaccgcggcgagaggcacctgctctacctgacggtcatcaactccaagggcgagatcctcgagcagcgcagcctgaacgacatcacgaccgcgagcgccaacggcacgcaggtcaccacgccgtaccacaagatcctcgacaagcgcgagatcgagaggctgaacgcgcgcaagggctggggcgagatcgaaacgatcaaggagctcaagtccggctacctcagccacgtcgtgcaccagatcaaccagctcatgctgaagtacaacgcgatcgtggtcctcgaggacctgaacttcggcttcaagaggggccgcttcaaggtggagaagcagatctaccagaacttcgagaacgccctgatcaagaagctcaaccacctggtcctcaaggacaaggcggacgacgagatcggcagctacaagaacgcgctccagctgaccaacaacttcacggacctcaagtccatcggcaagcagacgggcttcctgttctacgtgccggcgtggaacacctccaagatcgacccggaaaccggcttcgtcgacctgctcaagccgcgctacgagaacatcgcgcagtcccaggcgttcttcggcaagttcgacaagatctgctacaacaccgacaagggctacttcgagttccacatcgactacgcgaagttcaccgacaaggccaagaactccaggcagaagtgggccatctgcagccacggcgacaagcgctacgtgtacgacaagacggcgaaccagaacaagggcgcggccaagggcatcaacgtgaacgacgagctgaagtccctcttcgcgcgctaccacatcaacgacaagcagccgaacctcgtcatggacatctgccagaacaacgacaaggagttccacaagagcctgatgtgcctgctcaagaccctgctcgccctccgctactccaacgcgagctccgacgaggacttcatcctcagccccgtcgcgaacgacgagggcgtgttcttcaactccgccctcgcggacgacacgcagccgcagaacgccgacgcgaacggcgcctaccacatcgccctcaagggcctgtggctgctcaacgagctcaagaactccgacgacctgaacaaggtgaagctcgccattgacaaccagacgtggctgaatttcgctcagaatagggggggcgggggctcaggcgggggcgggagcggcggcgggggctctgggggcggcggcagcggcgggggcggcagcgggggcggcgggtcgccgaagaagaagcgcaaggtgtccggcggcagctccggcggcagcccgaagaagaagcgcaaagtgtgagggacccgatcgttcaaacatttggcaataaagtttcttaagattgaatcctgttgccggtcttgcgatgattatcatataatttctgttgaattacgttaagcatgtaataattaacatgtaatgcatgacgttatttatgagatgggtttttatgattagagtcccgcaattatacatttaatacgcgatagaaaacaaaatatagcgcgcaaactaggataaattatcgcgcgcggtgtcatctatgttactagatcggtaccgaattcattatgtggtctaggtaggttctatatataagaaaacttgaaatgttctaaaaaaaaattcaagcccatgcatgattgaagcaaacggtatagcaacggtgttaacctgatctagtgatctcttgcaatccttaacggccacctaccgcaggtagcaaacggcgtccccctcctcgatatctccgcggcgacctctggctttttccgcggaattgcgcggtggggacggattccacgagaccgcgacgcaaccgcctctcgccgctgggccccacaccgctcggtgccgtagcctcacgggactctttctccctcctcccccgttataaattggcttcatcccctccttgcctcatccatccaaatcccagtccccaatcccatcccttcgtaggagaaattcatcgaagctaagcgaatcctcgcgatcctctcaaggtactgcgagttttcgatccccctctcgacccctcgtatgtttgtgtttgtcgtagcgtttgattaggtatgctttccctgtttgtgttcgtcgtagcgtttgattaggtatgctttccctgttcgtgttcatcgtagtgtttgattaggtcgtgtgaggcgatggcctgctcgcgtccttcgatctgtagtcgatttgcgggtcgtggtgtagatctgcgggctgtgatgaagttatttggtgtgatctgctcgcctgattctgcgggttggctcgagtagatatgatggttggaccggttggttcgtttaccgcgctagggttgggctgggatgatgttgcatgcgccgttgcgcgtgatcccgcagcaggacttgcgtttgattgccagatctcgttacgattatgtgatttggtttggactttttagatctgtagcttctgcttatgtgccagatgcgcctactgctcatatgcctgatgataatcataaatggctgtggaactaactagttgattgcggagtcatgtatcagctacaggtgtagggactagctacaggtgtagggacttgcgtctaattgtttggtcctttactcatgttgcaattatgcaatttagtttagattgtttgttccactcatctaggctgtaaaagggacactgcttagattgctgtttaatctttttagtagattatattatattggtaacttattacccctattacatgccatacgtgacttctgctcatgcctgatgataatcatagatcactgtggaattaattagttgattgttgaatcatgtttcatgtacataccacggcacaattgcttagttccttaacaaatgcaaattttactgatccatgtatgatttgcgtggttctctaatgtgaaatactatagctacttgttagtaagaatcaggttcgtatgcttaatgctgtatgtgccttctgctcatgcctgatgataatcatatatcactggaattaattagttgatcgtttaatcatatatcaagtacataccatgccacaatttttagtcacttaacccatgcagattgaactggtccctgcatgttttgctaaattgttctattctgattagaccatatatcatgtatttttttttggtaatggttctcttattttaaatgctatatagttctggtacttgttagaaagatctgcttcatagtttagttgcctatccctcgaattaggatgctgagcagctgatcctatagctttgtttcatgtatcaattcttttgtgttcaacagtcagtttttgttagattcattgtaacttatggtcgcttactcttctggtcctcaatgcttgcagaagcttgaaattctgatgagtccgtgaggacgaaacgagtaagctcgtcaatttctactgtttgtagatgggaaagaccgaggagaagatctaatttctactgtttgtagatgcaccaaggaaggggaggagatcaatttctactgtttgtagatgtcacagatcacaaacttcaaatgaatttctactgtttgtagatacgcccagaaagcatacgcagtcggccggcatggtcccagcctcctcgctggcgccggctgggcaacatgcttcggcatggcgaatgggacgatcgttcaaacatttggcaataaagtttcttaagattgaatcctgttgccggtcttgcgatgattatcatataatttctgttgaattacgttaagcatgtaataattaacatgtaatgcatgacgttatttatgagatgggtttttatgattagagtcccgcaattatacatttaatacgcgatagaaaacaaaatatagcgcgcaaactaggataaattatcgcgcgcggtgtcatctatgttactagatccctaggctgcagtgcagcgtgacccggtcgtgcccctctctagagataatgagcattgcatgtctaagttataaaaaattaccacatattttttttgtcacacttgtttgaagtgcagtttatctatctttatacatatatttaaactttactctacgaataatataatctatagtactacaataatatcagtgttttagagaatcatataaatgaacagttagacatggtctaaaggacaattgagtattttgacaacaggactctacagttttatctttttagtgtgcatgtgttctcctttttttttgcaaatagcttcacctatataatacttcatccattttattagtacatccatttagggtttagggttaatggtttttatagactaatttttttagtacatctattttattctattttagcctctaaattaagaaaactaaaactctattttagtttttttatttaataatttagatataaaatagaataaaataaagtgactaaaaattaaacaaataccctttaagaaattaaaaaaactaaggaaacatttttcttgtttcgagtagataatgccagcctgttaaacgccgtcgacgagtctaacggacaccaaccagcgaaccagcagcgtcgcgtcgggccaagcgaagcagacggcacggcatctctgtcgctgcctctggacccctctcgagagttccgctccaccgttggacttgctccgctgtcggcatccagaaattgcgtggcggagcggcagacgtgagccggcacggcaggcggcctcctcctcctctcacggcaccggcagctacgggggattcctttcccaccgctccttcgctttcccttcctcgcccgccgtaataaatagacaccccctccacaccctctttccccaacctcgtgttgttcggagcgcacacacacacaaccagatctcccccaaatccacccgtcggcacctccgcttcaaggtacgccgctcgtcctccccccccccccctctctaccttctctagatcggcgttccggtccatggttagggcccggtagttctacttctgttcatgtttgtgttagatccgtgtttgtgttagatccgtgctgctagcgttcgtacacggatgcgacctgtacgtcagacacgttctgattgctaacttgccagtgtttctctttggggaatcctgggatggctctagccgttccgcagacgggatcgatttcatgattttttttgtttcgttgcatagggtttggtttgcccttttcctttatttcaatatatgccgtgcacttgtttgtcgggtcatcttttcatgcttttttttgtcttggttgtgatgatgtggtctggttgggcggtcgttctagatcggagtagaattctgtttcaaactacctggtggatttattaattttggatctgtatgtgtgtgccatacatattcatagttacgaattgaagatgatggatggaaatatcgatctaggataggtatacatgttgatgcgggttttactgatgcatatacagagatgctttttgttcgcttggttgtgatgatgtggtgtggttgggcggtcgttcattcgttctagatcggagtagaatactgtttcaaactacctggtgtatttattaattttggaactgtatgtgtgtgtcatacatcttcatagttacgagtttaagatggatggaaatatcgatctaggataggtatacatgttgatgtgggttttactgatgcatatacatgatggcatatgcagcatctattcatatgctctaaccttgagtacctatctattataataaacaagtatgttttataattattttgatcttgatatacttggatgatggcatatgcagcagctatatgtggatttttttagccctgccttcatacgctatttatttgcttggtactgtttcttttgtcgatgctcaccctgttgtttggtgttacttctgcagggatcaccgatcatgcaaaaactcattaactcagtgcaaaactatgcctggggcagcaaaacggcgttgactgaactttatggtatggaaaatccgtccagccagccgatggccgagctgtggatgggcgcacatccgaaaagcagttcacgagtgcagaatgccgccggagatatcgtttcactgcgtgatgtgattgagagtgataaatcgactctgctcggagaggccgttgccaaacgctttggcgaactgcctttcctgttcaaagtattatgcgcagcacagccactctccattcaggttcatccaaacaaacacaattctgaaatcggttttgccaaagaaaatgccgcaggtatcccgatggatgccgccgagcgtaactataaagatcctaaccacaagccggagctggtttttgcgctgacgcctttccttgcgatgaacgcgtttcgtgaattttccgagattgtctccctactccagccggtcgcaggtgcacatccggcgattgctcactttttacaacagcctgatgccgaacgtttaagcgaactgttcgccagcctgttgaatatgcagggtgaagaaaaatcccgcgcgctggcgattttaaaatcggccctcgatagccagcagggtgaaccgtggcaaacgattcgtttaatttctgaattttacccggaagacagcggtctgttctccccgctattgctgaatgtggtgaaattgaaccctggcgaagcgatgttcctgttcgctgaaacaccgcacgcttacctgcaaggcgtggcgctggaagtgatggcaaactccgataacgtgctgcgtgcgggtctgacgcctaaatacattgatattccggaactggttgccaatgtgaaattcgaagccaaaccggctaaccagttgttgacccagccggtgaaacaaggtgcagaactggacttcccgattccagtggatgattttgccttctcgctgcatgaccttagtgataaagaaaccaccattagccagcagagtgccgccattttgttctgcgtcgaaggcgatgcaacgttgtggaaaggttctcagcagttacagcttaaaccgggtgaatcagcgtttattgccgccaacgaatcaccggtgactgtcaaaggccacggccgtttagcgcgtgtttacaacaagctgtaagagcttactgaaaaaattaacatctcttgctaagctgggagctcgatccgtcgacctgcagatcgttcaaacatttggcaataaagtttcttaagattgaatcctgttgccggtcttgcgatgattatcatataatttctgttgaattacgttaagcatgtaataattaacatgtaatgcatgacgttatttatgagatgggtttttatgattagagtcccgcaattatacatttaatacgcgatagaaaacaaaatatagcgcgcaaactaggataaattatcgcgcgcggtgtcatctatgttactagatccggaccgcctgcaggcccgggggcgcgccctaattagctaacggccaggatcgccgcgtgagcctttagcaactagctagattaattaacgcaatctgttattaagttgtctaagcgtcaatttgtttacaccacaatatatcctgccaccagccagccaacagctccccgaccggcagctcggcacaaaatcaccactcgatacaggcagcccatcagaattaattctcatgtttgacagcttatcatcgactgcacggtgcaccaatgcttctggcgtcaggcagccatcggaagctgtggtatggctgtgcaggtcgtaaatcactgcataattcgtgtcgctcaaggcgcactcccgttctggataatgttttttgcgccgacatcataacggttctggcaaatattctgaaatgagctgttgacaattaatcatccggctcgtataatgtgtggaattgtgagcggataacaatttcacacaggaaacagaccatgagggaagcgttgatcgccgaagtatcgactcaactatcagaggtagttggcgtcatcgagcgccatctcgaaccgacgttgctggccgtacatttgtacggctccgcagtggatggcggcctgaagccacacagtgatattgatttgctggttacggtgaccgtaaggcttgatgaaacaacgcggcgagctttgatcaacgaccttttggaaacttcggcttcccctggagagagcgagattctccgcgctgtagaagtcaccattgttgtgcacgacgacatcattccgtggcgttatccagctaagcgcgaactgcaatttggagaatggcagcgcaatgacattcttgcaggtatcttcgagccagccacgatcgacattgatctggctatcttgctgacaaaagcaagagaacatagcgttgccttggtaggtccagcggcggaggaactctttgatccggttcctgaacaggatctatttgaggcgctaaatgaaaccttaacgctatggaactcgccgcccgactgggctggcgatgagcgaaatgtagtgcttacgttgtcccgcatttggtacagcgcagtaaccggcaaaatcgcgccgaaggatgtcgctgccgactgggcaatggagcgcctgccggcccagtatcagcccgtcatacttgaagctaggcaggcttatcttggacaagaagatcgcttggcctcgcgcgcagatcagttggaagaatttgttcactacgtgaaaggcgagatcaccaaagtagtcggcaaataaagctctagtggatctccgtacccagggatctggctcgcggcggacgcacgacgccggggcgagaccataggcgatctcctaaatcaatagtagctgtaacctcgaagcgtttcacttgtaacaacgattgagaatttttgtcataaaattgaaatacttggttcgcatttttgtcatccgcggtcagccgcaattctgacgaactgcccatttagctggagatgattgtacatccttcacgtgaaaatttctcaagcgctgtgaacaagggttcagattttagattgaaaggtgagccgttgaaacacgttcttcttgtcgatgacgacgtcgctatgcggcatcttattattgaataccttacgatccacgccttcaaagtgaccgcggtagccgacagcacccagttcacaagagtactctcttccgcgacggtcgatgtcgtggttgttgatctagatttaggtcgtgaagatgggctcgagatcgttcgtaatctggcggcaaagtctgatattccaatcataattatcagtggcgaccgccttgaggagacggataaagttgttgcactcgagctaggagcaagtgattttatcgctaagccgttcagtatcagagagtttctagcacgcattcgggttgccttgcgcgtgcgccccaacgttgtccgctccaaagaccgacggtctttttgttttactgactggacacttaatctcaggcaacgtcgcttgatgtccgaagctggcggtgaggtgaaacttacggcaggtgagttcaatcttctcctcgcgtttttagagaaaccccgcgacgttctatcgcgcgagcaacttctcattgccagtcgagtacgcgacgaggaggtttatgacaggagtatagatgttctcattttgaggctgcgccgcaaacttgaggcagatccgtcaagccctcaactgataaaaacagcaagaggtgccggttatttctttgacgcggacgtgcaggtttcgcacggggggacgatggcagcctgagccaattcccagatccccgaggaatcggcgtgagcggtcgcaaaccatccggcccggtacaaatcggcgcggcgctgggtgatgacctggtggagaagttgaaggccgcgcaggccgcccagcggcaacgcatcgaggcagaagcacgccccggtgaatcgtggcaagcggccgctgatcgaatccgcaaagaatcccggcaaccgccggcagccggtgcgccgtcgattaggaagccgcccaagggcgacgagcaaccagattttttcgttccgatgctctatgacgtgggcacccgcgatagtcgcagcatcatggacgtggccgttttccgtctgtcgaagcgtgaccgacgagctggcgaggtgatccgctacgagcttccagacgggcacgtagaggtttccgcagggccggccggcatggccagtgtgtgggattacgacctggtactgatggcggtttcccatctaaccgaatccatgaaccgataccgggaagggaagggagacaagcccggccgcgtgttccgtccacacgttgcggacgtactcaagttctgccggcgagccgatggcggaaagcagaaagacgacctggtagaaacctgcattcggttaaacaccacgcacgttgccatgcagcgtacgaagaaggccaagaacggccgcctggtgacggtatccgagggtgaagccttgattagccgctacaagatcgtaaagagcgaaaccgggcggccggagtacatcgagatcgagctggctgattggatgtaccgcgagatcacagaaggcaagaacccggacgtgctgacggttcaccccgattactttttgatcgatcccggcatcggccgttttctctaccgcctggcacgccgcgccgcaggcaaggcagaagccagatggttgttcaagacgatctacgaacgcagtggcagcgccggagagttcaagaagttctgtttcaccgtgcgcaagctgatcgggtcaaatgacctgccggagtacgatttgaaggaggaggcggggcaggctggcccgatcctagtcatgcgctaccgcaacctgatcgagggcgaagcatccgccggttcctaatgtacggagcagatgctagggcaaattgccctagcaggggaaaaaggtcgaaaaggtctctttcctgtggatagcacgtacattgggaacccaaagccgtacattgggaaccggaacccgtacattgggaacccaaagccgtacattgggaaccggtcacacatgtaagtgactgatataaaagagaaaaaaggcgatttttccgcctaaaactctttaaaacttattaaaactcttaaaacccgcctggcctgtgcataactgtctggccagcgcacagccgaagagctgcaaaaagcgcctacccttcggtcgctgcgctccctacgccccgccgcttcgcgtcggcctatcgcggccgctggccgctcaaaaatggctggcctacggccaggcaatctaccagggcgcggacaagccgcgccgtcgccactcgaccgccggcgctgaggtctgcctcgtgaagaaggtgttgctgactcataccaggcctgaatcgccccatcatccagccagaaagtgagggagccacggttgatgagagctttgttgtaggtggaccagttggtgattttgaacttttgctttgccacggaacggtctgcgttgtcgggaagatgcgtgatctgatccttcaactcagcaaaagttcgatttattcaacaaagccgccgtcccgtcaagtcagcgtaatgctctgccagtgttacaaccaattaaccaattctgattagaaaaactcatcgagcatcaaatgaaactgcaatttattcatatcaggattatcaataccatatttttgaaaaagccgtttctgtaatgaaggagaaaactcaccgaggcagttccataggatggcaagatcctggtatcggtctgcgattccgactcgtccaacatcaatacaacctattaatttcccctcgtcaaaaataaggttatcaagtgagaaatcaccatgagtgacgactgaatccggtgagaatggcaaaagctctgcattaatgaatcggccaacgcgcggggagaggcggtttgcgtattgggcgctcttccgcttcctcgctcactgactcgctgcgctcggtcgttcggctgcggcgagcggtatcagctcactcaaaggcggtaatacggttatccacagaatcaggggataacgcaggaaagaacatgtgagcaaaaggccagcaaaaggccaggaaccgtaaaaaggccgcgttgctggcgtttttccataggctccgcccccctgacgagcatcacaaaaatcgacgctcaagtcagaggtggcgaaacccgacaggactataaagataccaggcgtttccccctggaagctccctcgtgcgctctcctgttccgaccctgccgcttaccggatacctgtccgcctttctcccttcgggaagcgtggcgctttctcatagctcacgctgtaggtatctcagttcggtgtaggtcgttcgctccaagctgggctgtgtgcacgaaccccccgttcagcccgaccgctgcgccttatccggtaactatcgtcttgagtccaacccggtaagacacgacttatcgccactggcagcagccactggtaacaggattagcagagcgaggtatgtaggcggtgctacagagttcttgaagtggtggcctaactacggctacactagaagaacagtatttggtatctgcgctctgctgaagccagttaccttcggaaaaagagttggtagctcttgatccggcaaacaaaccaccgctggtagcggtggtttttttgtttgcaagcagcagattacgcgcagaaaaaaaggatctcaagaagatcctttgatcttttctacggggtctgacgctcagtggaacgaaaactcacgttaagggattttggtcatgagattatcaaaaaggatcttcacctagatccttttgatccggaatta

SEQ ID NO: 125 - DNA, 17504 bp, synthetic construct
  source 1..17504: mol_type = other DNA
attcctgtggttggcatgcacatacaaatggacgaacggataaaccttttcacgcccttttaaatatccgattattctaataaacgctcttttctcttaggtttacccgccaatatatcctgtcaaacactgatagtttaaactggcactagcctaacggtgttgactaactaggccgcttccctaattagctaacccgggggcgcgccgggaccggaattcattatgtggtctaggtaggttctatatataagaaaacttgaaatgttctaaaaaaaaattcaagcccatgcatgattgaagcaaacggtatagcaacggtgttaacctgatctagtgatctcttgcaatccttaacggccacctaccgcaggtagcaaacggcgtccccctcctcgatatctccgcggcgacctctggctttttccgcggaattgcgcggtggggacggattccacgagaccgcgacgcaaccgcctctcgccgctgggccccacaccgctcggtgccgtagcctcacgggactctttctccctcctcccccgttataaattggcttcatcccctccttgcctcatccatccaaatcccagtccccaatcccatcccttcgtaggagaaattcatcgaagctaagcgaatcctcgcgatcctctcaaggtactgcgagttttcgatccccctctcgacccctcgtatgtttgtgtttgtcgtagcgtttgattaggtatgctttccctgtttgtgttcgtcgtagcgtttgattaggtatgctttccctgttcgtgttcatcgtagtgtttgattaggtcgtgtgaggcgatggcctgctcgcgtccttcgatctgtagtcgatttgcgggtcgtggtgtagatctgcgggctgtgatgaagttatttggtgtgatctgctcgcctgattctgcgggttggctcgagtagatatgatggttggaccggttggttcgtttaccgcgctagggttgggctgggatgatgttgcatgcgccgttgcgcgtgatcccgcagcaggacttgcgtttgattgccagatctcgttacgattatgtgatttggtttggactttttagatctgtagcttctgcttatgtgccagatgcgcctactgctcatatgcctgatgataatcataaatggctgtggaactaactagttgattgcggagtcatgtatcagctacaggtgtagggactagctacaggtgtagggacttgcgtctaattgtttggtcctttactcatgttgcaattatgcaatttagtttagattgtttgttccactcatctaggctgtaaaagggacactgcttagattgctgtttaatctttttagtagattatattatattggtaacttattacccctattacatgccatacgtgacttctgctcatgcctgatgataatcatagatcactgtggaattaattagttgattgttgaatcatgtttcatgtacataccacggcacaattgcttagttccttaacaaatgcaaattttactgatccatgtatgatttgcgtggttctctaatgtgaaatactatagctacttgttagtaagaatcaggttcgtatgcttaatgctgtatgtgccttctgctcatgcctgatgataatcatatatcactggaattaattagttgatcgtttaatcatatatcaagtacataccatgccacaatttttagtcacttaacccatgcagattgaactggtccctgcatgttttgctaaattgttctattctgattagaccatatatcatgtatttttttttggtaatggttctcttattttaaatgctatatagttctggtacttgttagaaagatctgcttcatagtttagttgcctatccctcgaattaggatgctgagcagctgatcctatagctttgtttcatgtatcaattcttttgtgttcaacagtcagtttttgttagattcattgtaacttatggtcgcttactcttctggtcctcaatgcttgcagggatcccctaaatagaccatgccgaagaagaagcgcaaggtcgggggcgggggctcaggcgggggcgggagcggcggcgggggctctgggggcggcggcagcggcgggggcggcagcgggggcggcgggtcgatgctgttccaggatttcactcatctgtaccctctctcaaagactgttcggttcgagctcaagcctattgggcggactctggagcacatccacgcgaagaacttcctcagccaggacgaaaccatggccgacatgtaccagaaggtcaaggtcatcctcgacgactaccacagggacttcatcgcggacatgatgggcgaggtgaagctgacgaagctcgccgagttctacgacgtctacctcaagttccgcaagaacccgaaggacgacggcctccagaagcagctcaaggacctgcaggccgtcctgaggaaggagtccgtcaagcccatcggcagcggcggcaagtacaagaccggctacgacaggctgttcggcgccaagctgttcaaggacggcaaggagctcggcgacctggcgaagttcgtgatcgcgcaggagggcgagagctcccccaagctggcccacctggcccacttcgagaagttcagcacgtacttcaccggcttccacgacaacaggaagaacatgtacagcgacgaggacaagcacacggccatcgcctaccgcctcatccacgagaacctgccccgcttcatcgacaacctgcagatcctgacgaccatcaagcagaagcactccgccctgtacgaccagatcatcaacgagctcaccgcgagcggcctcgacgtgtccctcgccagccacctcgacggctaccacaagctcctgacccaggagggcatcaccgcctacaaccgcatcatcggcgaggtgaacggctacaccaacaagcacaaccagatctgccacaagtccgagaggatcgccaagctcaggcccctgcacaagcagatcctcagcgacggcatgggcgtgagcttcctcccgtccaagttcgccgacgactccgagatgtgccaggccgtgaacgagttctacaggcactacaccgacgtgttcgccaaggtgcagtccctgttcgacggcttcgacgaccaccagaaggacggcatctacgtggagcacaagaacctgaacgagctgtccaagcaggccttcggcgactgggccctcctgggccgcgtgctggacggctactacgtggacgtcgtgaacccggagttcaacgagcgcttcgcgaaggcgaagacggacaacgcgaaggccaagctcaccaaggagaaggacaagttcatcaagggcgtccacagcctcgcgtccctggagcaggcgatcgagcaccacaccgcgcgccacgacgacgagtccgtgcaggccggcaagctcggccagtacttcaagcacggcctggccggcgtcgacaacccgatccagaagatccacaacaaccactccaccatcaagggcttcctggagagggagcgcccggcgggcgagcgcgcgctccccaagatcaagtccggcaagaaccccgagatgacgcagctcaggcagctgaaggagctgctcgacaacgcgctcaacgtggcgcacttcgccaagctgctcacgaccaagaccacgctggacaaccaggacggcaacttctacggcgagttcggcgtcctgtacgacgagctggcgaagatcccgaccctgtacaacaaggtccgcgactacctgagccagaagcccttctccaccgagaagtacaagctcaacttcggcaacccgaccctcctgaacggctgggacctcaacaaggagaaggacaacttcggcgtgatcctccagaaggacggctgctactacctcgccctgctggacaaggcgcacaagaaggtcttcgacaacgccccgaacaccggcaagaacgtgtaccagaagatggtgtacaagctgctccccggccccaacaagatgctgccgaaggtgttcttcgcgaagtccaacctcgactactacaaccccagcgccgagctcctggacaagtacgccaagggcacgcacaagaagggcgacaacttcaacctcaaggactgccacgcgctgatcgacttcttcaaggcgggcatcaacaagcaccccgagtggcagcacttcggcttcaagttcagcccgacctccagctacagggacctcagcgacttctaccgcgaggtggagccccagggctaccaggtgaagttcgtcgacatcaacgccgactacatcgacgagctcgtcgagcagggcaagctctacctgttccagatctacaacaaggacttctccccgaaggcccacggcaagccgaacctccacacgctctacttcaaggccctcttcagcgaggacaacctggccgacccgatctacaagctcaacggcgaggcgcagatcttctaccgcaaggccagcctggacatgaacgaaacgaccatccacagggccggcgaggtcctggccaacaagaacccggacaacccgaagaagaggcagttcgtctacgacatcatcaaggacaagaggtacacccaggacaagttcatgctccacgtcccgatcaccatgaacttcggcgtccagggcatgaccatcaaggagttcaacaagaaggtcaaccagagcatccagcagtacgacgaggtgaacgtcatcggcatcgaccgcggcgagaggcacctgctctacctgacggtcatcaactccaagggcgagatcctcgagcagcgcagcctgaacaccatccagcagttcgactaccagaagaagctggacaacagggagaaggagagggtggccgcccgccaggcctggggcgagatcgaaacgatcaaggagctcaagtccggctacctcagccacgtcgtgcaccagatcaaccagctcatgctgaagtacaacgcgatcgtggtcctcgaggacctgaacttcggcttcaagaggggccgcttcaaggtggagaagcagatctaccagaacttcgagaacgccctgatcaagaagctcaaccacctggtcctcaaggacaaggcggacgacgagatcggcagctacaagaacgcgctccagctgaccaacaacttcacggacctcaagtccatcggcaagcagacgggcttcctgttctacgtgccggcgtggaacacctccaagatcgacccggaaaccggcttcgtcgacctgctcaagccgcgctacgagaacatcgcgcagtcccaggcgttcttcggcaagttcgacaagatctgctacaacaccgacaagggctacttcgagttccacatcgactacgcgaagttcaccgacaaggccaagaactccaggcagaagtgggccatctgcagccacggcgacaagcgctacgtgtacgacaagacggcgaaccagaacaagggcgcggccaagggcatcaacgtgaacgacgagctgaagtccctcttcgcgcgctaccacatcaacgacaagcagccgaacctcgtcatggacatctgccagaacaacgacaaggagttccacaagagcctgatgtgcctgctcaagaccctgctccagatgaggaactcgaacgccgcgaccggcgaggactacatcctcagccccgtcgcgaacgacgagggcgtgttcttcaactccgccctcgcggacgacacgcagccgcagaacgccgacgcgaacggcgcctaccacatcgccctcaagggcctgtggctgctcaacgagctcaagaactccgacgacctgaacaaggtgaagctcgccattgacaaccagacgtggctgaatttcgctcagaatagggggggcgggggctcaggcgggggcgggagcggcggcgggggctctgggggcggcggcagcggcgggggcggcagcgggggcggcgggtcgccgaagaagaagcgcaaggtgtccggcggcagctccggcggcagcccgaagaagaagcgcaaagtgtgagggacccgatcgttcaaacatttggcaataaagtttcttaagattgaatcctgttgccggtcttgcgatgattatcatataatttctgttgaattacgttaagcatgtaataattaacatgtaatgcatgacgttatttatgagatgggtttttatgattagagtcccgcaattatacatttaatacgcgatagaaaacaaaatatagcgcgcaaactaggataaattatcgcgcgcggtgtcatctatgttactagatcggtaccgaattcattatgtggtctaggtaggttctatatataagaaaacttgaaatgttctaaaaaaaaattcaagcccatgcatgattgaagcaaacggtatagcaacggtgttaacctgatctagtgatctcttgcaatccttaacggccacctaccgcaggtagcaaacggcgtccccctcctcgatatctccgcggcgacctctggctttttccgcggaattgcgcggtggggacggattccacgagaccgcgacgcaaccgcctctcgccgctgggccccacaccgctcggtgccgtagcctcacgggactctttctccctcctcccccgttataaattggcttcatcccctccttgcctcatccatccaaatcccagtccccaatcccatcccttcgtaggagaaattcatcgaagctaagcgaatcctcgcgatcctctcaaggtactgcgagttttcgatccccctctcgacccctcgtatgtttgtgtttgtcgtagcgtttgattaggtatgctttccctgtttgtgttcgtcgtagcgtttgattaggtatgctttccctgttcgtgttcatcgtagtgtttgattaggtcgtgtgaggcgatggcctgctcgcgtccttcgatctgtagtcgatttgcgggtcgtggtgtagatctgcgggctgtgatgaagttatttggtgtgatctgctcgcctgattctgcgggttggctcgagtagatatgatggttggaccggttggttcgtttaccgcgctagggttgggctgggatgatgttgcatgcgccgttgcgcgtgatcccgcagcaggacttgcgtttgattgccagatctcgttacgattatgtgatttggtttggactttttagatctgtagcttctgcttatgtgccagatgcgcctactgctcatatgcctgatgataatcataaatggctgtggaactaactagttgattgcggagtcatgtatcagctacaggtgtagggactagctacaggtgtagggacttgcgtctaattgtttggtcctttactcatgttgcaattatgcaatttagtttagattgtttgttccactcatctaggctgtaaaagggacactgcttagattgctgtttaatctttttagtagattatattatattggtaacttattacccctattacatgccatacgtgacttctgctcatgcctgatgataatcatagatcactgtggaattaattagttgattgttgaatcatgtttcatgtacataccacggcacaattgcttagttccttaacaaatgcaaattttactgatccatgtatgatttgcgtggttctctaatgtgaaatactatagctacttgttagtaagaatcaggttcgtatgcttaatgctgtatgtgccttctgctcatgcctgatgataatcatatatcactggaattaattagttgatcgtttaatcatatatcaagtacataccatgccacaatttttagtcacttaacccatgcagattgaactggtccctgcatgttttgctaaattgttctattctgattagaccatatatcatgtatttttttttggtaatggttctcttattttaaatgctatatagttctggtacttgttagaaagatctgcttcatagtttagttgcctatccctcgaattaggatgctgagcagctgatcctatagctttgtttcatgtatcaattcttttgtgttcaacagtcagtttttgttagattcattgtaacttatggtcgcttactcttctggtcctcaatgcttgcagaagcttgaaattctgatgagtccgtgaggacgaaacgagtaagctcgtcaatttctactgtttgtagatgggaaagaccgaggagaagatctaatttctactgtttgtagatgcaccaaggaaggggaggagatcaatttctactgtttgtagatgtcacagatcacaaacttcaaatgaatttctactgtttgtagatacgcccagaaagcatacgcagtcggccggcatggtcccagcctcctcgctggcgccggctgggcaacatgcttcggcatggcgaatgggacgatcgttcaaacatttggcaataaagtttcttaagattgaatcctgttgccggtcttgcgatgattatcatataatttctgttgaattacgttaagcatgtaataattaacatgtaatgcatgacgttatttatgagatgggtttttatgattagagtcccgcaattatacatttaatacgcgatagaaaacaaaatatagcgcgcaaactaggataaattatcgcgcgcggtgtcatctatgttactagatccctaggctgcagtgcagcgtgacccggtcgtgcccctctctagagataatgagcattgcatgtctaagttataaaaaattaccacatattttttttgtcacacttgtttgaagtgcagtttatctatctttatacatatatttaaactttactctacgaataatataatctatagtactacaataatatcagtgttttagagaatcatataaatgaacagttagacatggtctaaaggacaattgagtattttgacaacaggactctacagttttatctttttagtgtgcatgtgttctcctttttttttgcaaatagcttcacctatataatacttcatccattttattagtacatccatttagggtttagggttaatggtttttatagactaatttttttagtacatctattttattctattttagcctctaaattaagaaaactaaaactctattttagtttttttatttaataatttagatataaaatagaataaaataaagtgactaaaaattaaacaaataccctttaagaaattaaaaaaactaaggaaacatttttcttgtttcgagtagataatgccagcctgttaaacgccgtcgacgagtctaacggacaccaaccagcgaaccagcagcgtcgcgtcgggccaagcgaagcagacggcacggcatctctgtcgctgcctctggacccctctcgagagttccgctccaccgttggacttgctccgctgtcggcatccagaaattgcgtggcggagcggcagacgtgagccggcacggcaggcggcctcctcctcctctcacggcaccggcagctacgggggattcctttcccaccgctccttcgctttcccttcctcgcccgccgtaataaatagacaccccctccacaccctctttccccaacctcgtgttgttcggagcgcacacacacacaaccagatctcccccaaatccacccgtcggcacctccgcttcaaggtacgccgctcgtcctccccccccccccctctctaccttctctagatcggcgttccggtccatggttagggcccggtagttctacttctgttcatgtttgtgttagatccgtgtttgtgttagatccgtgctgctagcgttcgtacacggatgcgacctgtacgtcagacacgttctgattgctaacttgccagtgtttctctttggggaatcctgggatggctctagccgttccgcagacgggatcgatttcatgattttttttgtttcgttgcatagggtttggtttgcccttttcctttatttcaatatatgccgtgcacttgtttgtcgggtcatcttttcatgcttttttttgtcttggttgtgatgatgtggtctggttgggcggtcgttctagatcggagtagaattctgtttcaaactacctggtggatttattaattttggatctgtatgtgtgtgccatacatattcatagttacgaattgaagatgatggatggaaatatcgatctaggataggtatacatgttgatgcgggttttactgatgcatatacagagatgctttttgttcgcttggttgtgatgatgtggtgtggttgggcggtcgttcattcgttctagatcggagtagaatactgtttcaaactacctggtgtatttattaattttggaactgtatgtgtgtgtcatacatcttcatagttacgagtttaagatggatggaaatatcgatctaggataggtatacatgttgatgtgggttttactgatgcatatacatgatggcatatgcagcatctattcatatgctctaaccttgagtacctatctattataataaacaagtatgttttataattattttgatcttgatatacttggatgatggcatatgcagcagctatatgtggatttttttagccctgccttcatacgctatttatttgcttggtactgtttcttttgtcgatgctcaccctgttgtttggtgttacttctgcagggatcaccgatcatgcaaaaactcattaactcagtgcaaaactatgcctggggcagcaaaacggcgttgactgaactttatggtatggaaaatccgtccagccagccgatggccgagctgtggatgggcgcacatccgaaaagcagttcacgagtgcagaatgccgccggagatatcgtttcactgcgtgatgtgattgagagtgataaatcgactctgctcggagaggccgttgccaaacgctttggcgaactgcctttcctgttcaaagtattatgcgcagcacagccactctccattcaggttcatccaaacaaacacaattctgaaatcggttttgccaaagaaaatgccgcaggtatcccgatggatgccgccgagcgtaactataaagatcctaaccacaagccggagctggtttttgcgctgacgcctttccttgcgatgaacgcgtttcgtgaattttccgagattgtctccctactccagccggtcgcaggtgcacatccggcgattgctcactttttacaacagcctgatgccgaacgtttaagcgaactgttcgccagcctgttgaatatgcagggtgaagaaaaatcccgcgcgctggcgattttaaaatcggccctcgatagccagcagggtgaaccgtggcaaacgattcgtttaatttctgaattttacccggaagacagcggtctgttctccccgctattgctgaatgtggtgaaattgaaccctggcgaagcgatgttcctgttcgctgaaacaccgcacgcttacctgcaaggcgtggcgctggaagtgatggcaaactccgataacgtgctgcgtgcgggtctgacgcctaaatacattgatattccggaactggttgccaatgtgaaattcgaagccaaaccggctaaccagttgttgacccagccggtgaaacaaggtgcagaactggacttcccgattccagtggatgattttgccttctcgctgcatgaccttagtgataaagaaaccaccattagccagcagagtgccgccattttgttctgcgtcgaaggcgatgcaacgttgtggaaaggttctcagcagttacagcttaaaccgggtgaatcagcgtttattgccgccaacgaatcaccggtgactgtcaaaggccacggccgtttagcgcgtgtttacaacaagctgtaagagcttactgaaaaaattaacatctcttgctaagctgggagctcgatccgtcgacctgcagatcgttcaaacatttggcaataaagtttcttaagattgaatcctgttgccggtcttgcgatgattatcatataatttctgttgaattacgttaagcatgtaataattaacatgtaatgcatgacgttatttatgagatgggtttttatgattagagtcccgcaattatacatttaatacgcgatagaaaacaaaatatagcgcgcaaactaggataaattatcgcgcgcggtgtcatctatgttactagatccggaccgcctgcaggcccgggggcgcgccctaattagctaacggccaggatcgccgcgtgagcctttagcaactagctagattaattaacgcaatctgttattaagttgtctaagcgtcaatttgtttacaccacaatatatcctgccaccagccagccaacagctccccgaccggcagctcggcacaaaatcaccactcgatacaggcagcccatcagaattaattctcatgtttgacagcttatcatcgactgcacggtgcaccaatgcttctggcgtcaggcagccatcggaagctgtggtatggctgtgcaggtcgtaaatcactgcataattcgtgtcgctcaaggcgcactcccgttctggataatgttttttgcgccgacatcataacggttctggcaaatattctgaaatgagctgttgacaattaatcatccggctcgtataatgtgtggaattgtgagcggataacaatttcacacaggaaacagaccatgagggaagcgttgatcgccgaagtatcgactcaactatcagaggtagttggcgtcatcgagcgccatctcgaaccgacgttgctggccgtacatttgtacggctccgcagtggatggcggcctgaagccacacagtgatattgatttgctggttacggtgaccgtaaggcttgatgaaacaacgcggcgagctttgatcaacgaccttttggaaacttcggcttcccctggagagagcgagattctccgcgctgtagaagtcaccattgttgtgcacgacgacatcattccgtggcgttatccagctaagcgcgaactgcaatttggagaatggcagcgcaatgacattcttgcaggtatcttcgagccagccacgatcgacattgatctggctatcttgctgacaaaagcaagagaacatagcgttgccttggtaggtccagcggcggaggaactctttgatccggttcctgaacaggatctatttgaggcgctaaatgaaaccttaacgctatggaactcgccgcccgactgggctggcgatgagcgaaatgtagtgcttacgttgtcccgcatttggtacagcgcagtaaccggcaaaatcgcgccgaaggatgtcgctgccgactgggcaatggagcgcctgccggcccagtatcagcccgtcatacttgaagctaggcaggcttatcttggacaagaagatcgcttggcctcgcgcgcagatcagttggaagaatttgttcactacgtgaaaggcgagatcaccaaagtagtcggcaaataaagctctagtggatctccgtacccagggatctggctcgcggcggacgcacgacgccggggcgagaccataggcgatctcctaaatcaatagtagctgtaacctcgaagcgtttcacttgtaacaacgattgagaatttttgtcataaaattgaaatacttggttcgcatttttgtcatccgcggtcagccgcaattctgacgaactgcccatttagctggagatgattgtacatccttcacgtgaaaatttctcaagcgctgtgaacaagggttcagattttagattgaaaggtgagccgttgaaacacgttcttcttgtcgatgacgacgtcgctatgcggcatcttattattgaataccttacgatccacgccttcaaagtgaccgcggtagccgacagcacccagttcacaagagtactctcttccgcgacggtcgatgtcgtggttgttgatctagatttaggtcgtgaagatgggctcgagatcgttcgtaatctggcggcaaagtctgatattccaatcataattatcagtggcgaccgccttgaggagacggataaagttgttgcactcgagctaggagcaagtgattttatcgctaagccgttcagtatcagagagtttctagcacgcattcgggttgccttgcgcgtgcgccccaacgttgtccgctccaaagaccgacggtctttttgttttactgactggacacttaatctcaggcaacgtcgcttgatgtccgaagctggcggtgaggtgaaacttacggcaggtgagttcaatcttctcctcgcgtttttagagaaaccccgcgacgttctatcgcgcgagcaacttctcattgccagtcgagtacgcgacgaggaggtttatgacaggagtatagatgttctcattttgaggctgcgccgcaaacttgaggcagatccgtcaagccctcaactgataaaaacagcaagaggtgccggttatttctttgacgcggacgtgcaggtttcgcacggggggacgatggcagcctgagccaattcccagatccccgaggaatcggcgtgagcggtcgcaaaccatccggcccggtacaaatcggcgcggcgctgggtgatgacctggtggagaagttgaaggccgcgcaggccgcccagcggcaacgcatcgaggcagaagcacgccccggtgaatcgtggcaagcggccgctgatcgaatccgcaaagaatcccggcaaccgccggcagccggtgcgccgtcgattaggaagccgcccaagggcgacgagcaaccagattttttcgttccgatgctctatgacgtgggcacccgcgatagtcgcagcatcatggacgtggccgttttccgtctgtcgaagcgtgaccgacgagctggcgaggtgatccgctacgagcttccagacgggcacgtagaggtttccgcagggccggccggcatggccagtgtgtgggattacgacctggtactgatggcggtttcccatctaaccgaatccatgaaccgataccgggaagggaagggagacaagcccggccgcgtgttccgtccacacgttgcggacgtactcaagttctgccggcgagccgatggcggaaagcagaaagacgacctggtagaaacctgcattcggttaaacaccacgcacgttgccatgcagcgtacgaagaaggccaagaacggccgcctggtgacggtatccgagggtgaagccttgattagccgctacaagatcgtaaagagcgaaaccgggcggccggagtacatcgagatcgagctggctgattggatgtaccgcgagatcacagaaggcaagaacccggacgtgctgacggttcaccccgattactttttgatcgatcccggcatcggccgttttctctaccgcctggcacgccgcgccgcaggcaaggcagaagccagatggttgttcaagacgatctacgaacgcagtggcagcgccggagagttcaagaagttctgtttcaccgtgcgcaagctgatcgggtcaaatgacctgccggagtacgatttgaaggaggaggcggggcaggctggcccgatcctagtcatgcgctaccgcaacctgatcgagggcgaagcatccgccggttcctaatgtacggagcagatgctagggcaaattgccctagcaggggaaaaaggtcgaaaaggtctctttcctgtggatagcacgtacattgggaacccaaagccgtacattgggaaccggaacccgtacattgggaacccaaagccgtacattgggaaccggtcacacatgtaagtgactgatataaaagagaaaaaaggcgatttttccgcctaaaactctttaaaacttattaaaactcttaaaacccgcctggcctgtgcataactgtctggccagcgcacagccgaagagctgcaaaaagcgcctacccttcggtcgctgcgctccctacgccccgccgcttcgcgtcggcctatcgcggccgctggccgctcaaaaatggctggcctacggccaggcaatctaccagggcgcggacaagccgcgccgtcgccactcgaccgccggcgctgaggtctgcctcgtgaagaaggtgttgctgactcataccaggcctgaatcgccccatcatccagccagaaagtgagggagccacggttgatgagagctttgttgtaggtggaccagttggtgattttgaacttttgctttgccacggaacggtctgcgttgtcgggaagatgcgtgatctgatccttcaactcagcaaaagttcgatttattcaacaaagccgccgtcccgtcaagtcagcgtaatgctctgccagtgttacaaccaattaaccaattctgattagaaaaactcatcgagcatcaaatgaaactgcaatttattcatatcaggattatcaataccatatttttgaaaaagccgtttctgtaatgaaggagaaaactcaccgaggcagttccataggatggcaagatcctggtatcggtctgcgattccgactcgtccaacatcaatacaacctattaatttcccctcgtcaaaaataaggttatcaagtgagaaatcaccatgagtgacgactgaatccggtgagaatggcaaaagctctgcattaatgaatcggccaacgcgcggggagaggcggtttgcgtattgggcgctcttccgcttcctcgctcactgactcgctgcgctcggtcgttcggctgcggcgagcggtatcagctcactcaaaggcggtaatacggttatccacagaatcaggggataacgcaggaaagaacatgtgagcaaaaggccagcaaaaggccaggaaccgtaaaaaggccgcgttgctggcgtttttccataggctccgcccccctgacgagcatcacaaaaatcgacgctcaagtcagaggtggcgaaacccgacaggactataaagataccaggcgtttccccctggaagctccctcgtgcgctctcctgttccgaccctgccgcttaccggatacctgtccgcctttctcccttcgggaagcgtggcgctttctcatagctcacgctgtaggtatctcagttcggtgtaggtcgttcgctccaagctgggctgtgtgcacgaaccccccgttcagcccgaccgctgcgccttatccggtaactatcgtcttgagtccaacccggtaagacacgacttatcgccactggcagcagccactggtaacaggattagcagagcgaggtatgtaggcggtgctacagagttcttgaagtggtggcctaactacggctacactagaagaacagtatttggtatctgcgctctgctgaagccagttaccttcggaaaaagagttggtagctcttgatccggcaaacaaaccaccgctggtagcggtggtttttttgtttgcaagcagcagattacgcgcagaaaaaaaggatctcaagaagatcctttgatcttttctacggggtctgacgctcagtggaacgaaaactcacgttaagggattttggtcatgagattatcaaaaaggatcttcacctagatccttttgatccggaatta

SEQ ID NO: 126 - DNA, 17504 bp, synthetic construct
  source 1..17504: mol_type = other DNA
attcctgtggttggcatgcacatacaaatggacgaacggataaaccttttcacgcccttttaaatatccgattattctaataaacgctcttttctcttaggtttacccgccaatatatcctgtcaaacactgatagtttaaactggcactagcctaacggtgttgactaactaggccgcttccctaattagctaacccgggggcgcgccgggaccggaattcattatgtggtctaggtaggttctatatataagaaaacttgaaatgttctaaaaaaaaattcaagcccatgcatgattgaagcaaacggtatagcaacggtgttaacctgatctagtgatctcttgcaatccttaacggccacctaccgcaggtagcaaacggcgtccccctcctcgatatctccgcggcgacctctggctttttccgcggaattgcgcggtggggacggattccacgagaccgcgacgcaaccgcctctcgccgctgggccccacaccgctcggtgccgtagcctcacgggactctttctccctcctcccccgttataaattggcttcatcccctccttgcctcatccatccaaatcccagtccccaatcccatcccttcgtaggagaaattcatcgaagctaagcgaatcctcgcgatcctctcaaggtactgcgagttttcgatccccctctcgacccctcgtatgtttgtgtttgtcgtagcgtttgattaggtatgctttccctgtttgtgttcgtcgtagcgtttgattaggtatgctttccctgttcgtgttcatcgtagtgtttgattaggtcgtgtgaggcgatggcctgctcgcgtccttcgatctgtagtcgatttgcgggtcgtggtgtagatctgcgggctgtgatgaagttatttggtgtgatctgctcgcctgattctgcgggttggctcgagtagatatgatggttggaccggttggttcgtttaccgcgctagggttgggctgggatgatgttgcatgcgccgttgcgcgtgatcccgcagcaggacttgcgtttgattgccagatctcgttacgattatgtgatttggtttggactttttagatctgtagcttctgcttatgtgccagatgcgcctactgctcatatgcctgatgataatcataaatggctgtggaactaactagttgattgcggagtcatgtatcagctacaggtgtagggactagctacaggtgtagggacttgcgtctaattgtttggtcctttactcatgttgcaattatgcaatttagtttagattgtttgttccactcatctaggctgtaaaagggacactgcttagattgctgtttaatctttttagtagattatattatattggtaacttattacccctattacatgccatacgtgacttctgctcatgcctgatgataatcatagatcactgtggaattaattagttgattgttgaatcatgtttcatgtacataccacggcacaattgcttagttccttaacaaatgcaaattttactgatccatgtatgatttgcgtggttctctaatgtgaaatactatagctacttgttagtaagaatcaggttcgtatgcttaatgctgtatgtgccttctgctcatgcctgatgataatcatatatcactggaattaattagttgatcgtttaatcatatatcaagtacataccatgccacaatttttagtcacttaacccatgcagattgaactggtccctgcatgttttgctaaattgttctattctgattagaccatatatcatgtatttttttttggtaatggttctcttattttaaatgctatatagttctggtacttgttagaaagatctgcttcatagtttagttgcctatccctcgaattaggatgctgagcagctgatcctatagctttgtttcatgtatcaattcttttgtgttcaacagtcagtttttgttagattcattgtaacttatggtcgcttactcttctggtcctcaatgcttgcagggatcccctaaatagaccatgccgaagaagaagcgcaaggtcgggggcgggggctcaggcgggggcgggagcggcggcgggggctctgggggcggcggcagcggcgggggcggcagcgggggcggcgggtcgatgctgttccaggatttcactcatctgtaccctctctcaaagactgttcggttcgagctcaagcctattgggcggactctggagcacatccacgcgaagaacttcctcagccaggacgaaaccatggccgacatgtaccagaaggtcaaggtcatcctcgacgactaccacagggacttcatcgcggacatgatgggcgaggtgaagctgacgaagctcgccgagttctacgacgtctacctcaagttccgcaagaacccgaaggacgacggcctccagaagcagctcaaggacctgcaggccgtcctgaggaaggagtccgtcaagcccatcggcagcggcggcaagtacaagaccggctacgacaggctgttcggcgccaagctgttcaaggacggcaaggagctcggcgacctggcgaagttcgtgatcgcgcaggagggcgagagctcccccaagctggcccacctggcccacttcgagaagttcagcacgtacttcaccggcttccacaggaacaggaagaacatgtacagcgacgaggacaagcacacggccatcgcctaccgcctcatccacgagaacctgccccgcttcatcgacaacctgcagatcctgacgaccatcaagcagaagcactccgccctgtacgaccagatcatcaacgagctcaccgcgagcggcctcgacgtgtccctcgccagccacctcgacggctaccacaagctcctgacccaggagggcatcaccgcctacaaccgcatcatcggcgaggtgaacggctacaccaacaagcacaaccagatctgccacaagtccgagaggatcgccaagctcaggcccctgcacaagcagatcctcagcgacggcatgggcgtgagcttcctcccgtccaagttcgccgacgactccgagatgtgccaggccgtgaacgagttctacaggcactacaccgacgtgttcgccaaggtgcagtccctgttcgacggcttcgacgaccaccagaaggacggcatctacgtggagcacaagaacctgaacgagctgtccaagcaggccttcggcgactgggccctcctgggccgcgtgctggacggctactacgtggacgtcgtgaacccggagttcaacgagcgcttcgcgaaggcgaagacggacaacgcgaaggccaagctcaccaaggagaaggacaagttcatcaagggcgtccacagcctcgcgtccctggagcaggcgatcgagcaccacaccgcgcgccacgacgacgagtccgtgcaggccggcaagctcggccagtacttcaagcacggcctggccggcgtcgacaacccgatccagaagatccacaacaaccactccaccatcaagggcttcctggagagggagcgcccggcgggcgagcgcgcgctccccaagatcaagtccggcaagaaccccgagatgacgcagctcaggcagctgaaggagctgctcgacaacgcgctcaacgtggcgcacttcgccaagctgctcacgaccaagaccacgctggacaaccaggacggcaacttctacggcgagttcggcgtcctgtacgacgagctggcgaagatcccgaccctgtacaacaaggtccgcgactacctgagccagaagcccttctccaccgagaagtacaagctcaacttcggcaacccgaccctcctgaacggctgggacctcaacaaggagaaggacaacttcggcgtgatcctccagaaggacggctgctactacctcgccctgctggacaaggcgcacaagaaggtcttcgacaacgccccgaacaccggcaagaacgtgtaccagaagatggtgtacaagctgctccccggccccaacaagatgctgccgaaggtgttcttcgcgaagtccaacctcgactactacaaccccagcgccgagctcctggacaagtacgccaagggcacgcacaagaagggcgacaacttcaacctcaaggactgccacgcgctgatcgacttcttcaaggcgggcatcaacaagcaccccgagtggcagcacttcggcttcaagttcagcccgacctccagctacagggacctcagcgacttctaccgcgaggtggagccccagggctaccaggtgaagttcgtcgacatcaacgccgactacatcgacgagctcgtcgagcagggcaagctctacctgttccagatctacaacaaggacttctccccgaaggcccacggcaagccgaacctccacacgctctacttcaaggccctcttcagcgaggacaacctggccgacccgatctacaagctcaacggcgaggcgcagatcttctaccgcaaggccagcctggacatgaacgaaacgaccatccacagggccggcgaggtcctggccaacaagaacccggacaacccgaagaagaggcagttcgtctacgacatcatcaaggacaagaggtacacccaggacaagttcatgctccacgtcccgatcaccatgaacttcggcgtccagggcatgaccatcaaggagttcaacaagaaggtcaaccagagcatccagcagtacgacgaggtgaacgtcatcggcatcgaccgcggcgagaggcacctgctctacctgacggtcatcaactccaagggcgagatcctcgagcagcgcagcctgaacaccatccagcagttcgactaccagaagaagctggacaacagggagaaggagagggtggccgcccgccaggcctggggcgagatcgaaacgatcaaggagctcaagtccggctacctcagccacgtcgtgcaccagatcaaccagctcatgctgaagtacaacgcgatcgtggtcctcgaggacctgaacttcggcttcaagaggggccgcttcaaggtggagaagcagatctaccagaacttcgagaacgccctgatcaagaagctcaaccacctggtcctcaaggacaaggcggacgacgagatcggcagctacaagaacgcgctccagctgaccaacaacttcacggacctcaagtccatcggcaagcagacgggcttcctgttctacgtgccggcgtggaacacctccaagatcgacccggaaaccggcttcgtcgacctgctcaagccgcgctacgagaacatcgcgcagtcccaggcgttcttcggcaagttcgacaagatctgctacaacaccgacaagggctacttcgagttccacatcgactacgcgaagttcaccgacaaggccaagaactccaggcagaagtgggccatctgcagccacggcgacaagcgctacgtgtacgacaagacggcgaaccagaacaagggcgcggccaagggcatcaacgtgaacgacgagctgaagtccctcttcgcgcgctaccacatcaacgacaagcagccgaacctcgtcatggacatctgccagaacaacgacaaggagttccacaagagcctgatgtgcctgctcaagaccctgctccagatgaggaactcgaacgccgcgaccggcgaggactacatcctcagccccgtcgcgaacgacgagggcgtgttcttcaactccgccctcgcggacgacacgcagccgcagaacgccgacgcgaacggcgcctaccacatcgccctcaagggcctgtggctgctcaacgagctcaagaactccgacgacctgaacaaggtgaagctcgccattgacaaccagacgtggctgaatttcgctcagaatagggggggcgggggctcaggcgggggcgggagcggcggcgggggctctgggggcggcggcagcggcgggggcggcagcgggggcggcgggtcgccgaagaagaagcgcaaggtgtccggcggcagctccggcggcagcccgaagaagaagcgcaaagtgtgagggacccgatcgttcaaacatttggcaataaagtttcttaagattgaatcctgttgccggtcttgcgatgattatcatataatttctgttgaattacgttaagcatgtaataattaacatgtaatgcatgacgttatttatgagatgggtttttatgattagagtcccgcaattatacatttaatacgcgatagaaaacaaaatatagcgcgcaaactaggataaattatcgcgcgcggtgtcatctatgttactagatcggtaccgaattcattatgtggtctaggtaggttctatatataagaaaacttgaaatgttctaaaaaaaaattcaagcccatgcatgattgaagcaaacggtatagcaacggtgttaacctgatctagtgatctcttgcaatccttaacggccacctaccgcaggtagcaaacggcgtccccctcctcgatatctccgcggcgacctctggctttttccgcggaattgcgcggtggggacggattccacgagaccgcgacgcaaccgcctctcgccgctgggccccacaccgctcggtgccgtagcctcacgggactctttctccctcctcccccgttataaattggcttcatcccctccttgcctcatccatccaaatcccagtccccaatcccatcccttcgtaggagaaattcatcgaagctaagcgaatcctcgcgatcctctcaaggtactgcgagttttcgatccccctctcgacccctcgtatgtttgtgtttgtcgtagcgtttgattaggtatgctttccctgtttgtgttcgtcgtagcgtttgattaggtatgctttccctgttcgtgttcatcgtagtgtttgattaggtcgtgtgaggcgatggcctgctcgcgtccttcgatctgtagtcgatttgcgggtcgtggtgtagatctgcgggctgtgatgaagttatttggtgtgatctgctcgcctgattctgcgggttggctcgagtagatatgatggttggaccggttggttcgtttaccgcgctagggttgggctgggatgatgttgcatgcgccgttgcgcgtgatcccgcagcaggacttgcgtttgattgccagatctcgttacgattatgtgatttggtttggactttttagatctgtagcttctgcttatgtgccagatgcgcctactgctcatatgcctgatgataatcataaatggctgtggaactaactagttgattgcggagtcatgtatcagctacaggtgtagggactagctacaggtgtagggacttgcgtctaattgtttggtcctttactcatgttgcaattatgcaatttagtttagattgtttgttccactcatctaggctgtaaaagggacactgcttagattgctgtttaatctttttagtagattatattatattggtaacttattacccctattacatgccatacgtgacttctgctcatgcctgatgataatcatagatcactgtggaattaattagttgattgttgaatcatgtttcatgtacataccacggcacaattgcttagttccttaacaaatgcaaattttactgatccatgtatgatttgcgtggttctctaatgtgaaatactatagctacttgttagtaagaatcaggttcgtatgcttaatgctgtatgtgccttctgctcatgcctgatgataatcatatatcactggaattaattagttgatcgtttaatcatatatcaagtacataccatgccacaatttttagtcacttaacccatgcagattgaactggtccctgcatgttttgctaaattgttctattctgattagaccatatatcatgtatttttttttggtaatggttctcttattttaaatgctatatagttctggtacttgttagaaagatctgcttcatagtttagttgcctatccctcgaattaggatgctgagcagctgatcctatagctttgtttcatgtatcaattcttttgtgttcaacagtcagtttttgttagattcattgtaacttatggtcgcttactcttctggtcctcaatgcttgcagaagcttgaaattctgatgagtccgtgaggacgaaacgagtaagctcgtcaatttctactgtttgtagatgggaaagaccgaggagaagatctaatttctactgtttgtagatgcaccaaggaaggggaggagatcaatttctactgtttgtagatgtcacagatcacaaacttcaaatgaatttctactgtttgtagatacgcccagaaagcatacgcagtcggccggcatggtcccagcctcctcgctggcgccggctgggcaacatgcttcggcatggcgaatgggacgatcgttcaaacatttggcaataaagtttcttaagattgaatcctgttgccggtcttgcgatgattatcatataatttctgttgaattacgttaagcatgtaataattaacatgtaatgcatgacgttatttatgagatgggtttttatgattagagtcccgcaattatacatttaatacgcgatagaaaacaaaatatagcgcgcaaactaggataaattatcgcgcgcggtgtcatctatgttactagatccctaggctgcagtgcagcgtgacccggtcgtgcccctctctagagataatgagcattgcatgtctaagttataaaaaattaccacatattttttttgtcacacttgtttgaagtgcagtttatctatctttatacatatatttaaactttactctacgaataatataatctatagtactacaataatatcagtgttttagagaatcatataaatgaacagttagacatggtctaaaggacaattgagtattttgacaacaggactctacagttttatctttttagtgtgcatgtgttctcctttttttttgcaaatagcttcacctatataatacttcatccattttattagtacatccatttagggtttagggttaatggtttttatagactaatttttttagtacatctattttattctattttagcctctaaattaagaaaactaaaactctattttagtttttttatttaataatttagatataaaatagaataaaataaagtgactaaaaattaaacaaataccctttaagaaattaaaaaaactaaggaaacatttttcttgtttcgagtagataatgccagcctgttaaacgccgtcgacgagtctaacggacaccaaccagcgaaccagcagcgtcgcgtcgggccaagcgaagcagacggcacggcatctctgtcgctgcctctggacccctctcgagagttccgctccaccgttggacttgctccgctgtcggcatccagaaattgcgtggcggagcggcagacgtgagccggcacggcaggcggcctcctcctcctctcacggcaccggcagctacgggggattcctttcccaccgctccttcgctttcccttcctcgcccgccgtaataaatagacaccccctccacaccctctttccccaacctcgtgttgttcggagcgcacacacacacaaccagatctcccccaaatccacccgtcggcacctccgcttcaaggtacgccgctcgtcctccccccccccccctctctaccttctctagatcggcgttccggtccatggttagggcccggtagttctacttctgttcatgtttgtgttagatccgtgtttgtgttagatccgtgctgctagcgttcgtacacggatgcgacctgtacgtcagacacgttctgattgctaacttgccagtgtttctctttggggaatcctgggatggctctagccgttccgcagacgggatcgatttcatgattttttttgtttcgttgcatagggtttggtttgcccttttcctttatttcaatatatgccgtgcacttgtttgtcgggtcatcttttcatgcttttttttgtcttggttgtgatgatgtggtctggttgggcggtcgttctagatcggagtagaattctgtttcaaactacctggtggatttattaattttggatctgtatgtgtgtgccatacatattcatagttacgaattgaagatgatggatggaaatatcgatctaggataggtatacatgttgatgcgggttttactgatgcatatacagagatgctttttgttcgcttggttgtgatgatgtggtgtggttgggcggtcgttcattcgttctagatcggagtagaatactgtttcaaactacctggtgtatttattaattttggaactgtatgtgtgtgtcatacatcttcatagttacgagtttaagatggatggaaatatcgatctaggataggtatacatgttgatgtgggttttactgatgcatatacatgatggcatatgcagcatctattcatatgctctaaccttgagtacctatctattataataaacaagtatgttttataattattttgatcttgatatacttggatgatggcatatgcagcagctatatgtggatttttttagccctgccttcatacgctatttatttgcttggtactgtttcttttgtcgatgctcaccctgttgtttggtgttacttctgcagggatcaccgatcatgcaaaaactcattaactcagtgcaaaactatgcctggggcagcaaaacggcgttgactgaactttatggtatggaaaatccgtccagccagccgatggccgagctgtggatgggcgcacatccgaaaagcagttcacgagtgcagaatgccgccggagatatcgtttcactgcgtgatgtgattgagagtgataaatcgactctgctcggagaggccgttgccaaacgctttggcgaactgcctttcctgttcaaagtattatgcgcagcacagccactctccattcaggttcatccaaacaaacacaattctgaaatcggttttgccaaagaaaatgccgcaggtatcccgatggatgccgccgagcgtaactataaagatcctaaccacaagccggagctggtttttgcgctgacgcctttccttgcgatgaacgcgtttcgtgaattttccgagattgtctccctactccagccggtcgcaggtgcacatccggcgattgctcactttttacaacagcctgatgccgaacgtttaagcgaactgttcgccagcctgttgaatatgcagggtgaagaaaaatcccgcgcgctggcgattttaaaatcggccctcgatagccagcagggtgaaccgtggcaaacgattcgtttaatttctgaattttacccggaagacagcggtctgttctccccgctattgctgaatgtggtgaaattgaaccctggcgaagcgatgttcctgttcgctgaaacaccgcacgcttacctgcaaggcgtggcgctggaagtgatggcaaactccgataacgtgctgcgtgcgggtctgacgcctaaatacattgatattccggaactggttgccaatgtgaaattcgaagccaaaccggctaaccagttgttgacccagccggtgaaacaaggtgcagaactggacttcccgattccagtggatgattttgccttctcgctgcatgaccttagtgataaagaaaccaccattagccagcagagtgccgccattttgttctgcgtcgaaggcgatgcaacgttgtggaaaggttctcagcagttacagcttaaaccgggtgaatcagcgtttattgccgccaacgaatcaccggtgactgtcaaaggccacggccgtttagcgcgtgtttacaacaagctgtaagagcttactgaaaaaattaacatctcttgctaagctgggagctcgatccgtcgacctgcagatcgttcaaacatttggcaataaagtttcttaagattgaatcctgttgccggtcttgcgatgattatcatataatttctgttgaattacgttaagcatgtaataattaacatgtaatgcatgacgttatttatgagatgggtttttatgattagagtcccgcaattatacatttaatacgcgatagaaaacaaaatatagcgcgcaaactaggataaattatcgcgcgcggtgtcatctatgttactagatccggaccgcctgcaggcccgggggcgcgccctaattagctaacggccaggatcgccgcgtgagcctttagcaactagctagattaattaacgcaatctgttattaagttgtctaagcgtcaatttgtttacaccacaatatatcctgccaccagccagccaacagctccccgaccggcagctcggcacaaaatcaccactcgatacaggcagcccatcagaattaattctcatgtttgacagcttatcatcgactgcacggtgcaccaatgcttctggcgtcaggcagccatcggaagctgtggtatggctgtgcaggtcgtaaatcactgcataattcgtgtcgctcaaggcgcactcccgttctggataatgttttttgcgccgacatcataacggttctggcaaatattctgaaatgagctgttgacaattaatcatccggctcgtataatgtgtggaattgtgagcggataacaatttcacacaggaaacagaccatgagggaagcgttgatcgccgaagtatcgactcaactatcagaggtagttggcgtcatcgagcgccatctcgaaccgacgttgctggccgtacatttgtacggctccgcagtggatggcggcctgaagccacacagtgatattgatttgctggttacggtgaccgtaaggcttgatgaaacaacgcggcgagctttgatcaacgaccttttggaaacttcggcttcccctggagagagcgagattctccgcgctgtagaagtcaccattgttgtgcacgacgacatcattccgtggcgttatccagctaagcgcgaactgcaatttggagaatggcagcgcaatgacattcttgcaggtatcttcgagccagccacgatcgacattgatctggctatcttgctgacaaaagcaagagaacatagcgttgccttggtaggtccagcggcggaggaactctttgatccggttcctgaacaggatctatttgaggcgctaaatgaaaccttaacgctatggaactcgccgcccgactgggctggcgatgagcgaaatgtagtgcttacgttgtcccgcatttggtacagcgcagtaaccggcaaaatcgcgccgaaggatgtcgctgccgactgggcaatggagcgcctgccggcccagtatcagcccgtcatacttgaagctaggcaggcttatcttggacaagaagatcgcttggcctcgcgcgcagatcagttggaagaatttgttcactacgtgaaaggcgagatcaccaaagtagtcggcaaataaagctctagtggatctccgtacccagggatctggctcgcggcggacgcacgacgccggggcgagaccataggcgatctcctaaatcaatagtagctgtaacctcgaagcgtttcacttgtaacaacgattgagaatttttgtcataaaattgaaatacttggttcgcatttttgtcatccgcggtcagccgcaattctgacgaactgcccatttagctggagatgattgtacatccttcacgtgaaaatttctcaagcgctgtgaacaagggttcagattttagattgaaaggtgagccgttgaaacacgttcttcttgtcgatgacgacgtcgctatgcggcatcttattattgaataccttacgatccacgccttcaaagtgaccgcggtagccgacagcacccagttcacaagagtactctcttccgcgacggtcgatgtcgtggttgttgatctagatttaggtcgtgaagatgggctcgagatcgttcgtaatctggcggcaaagtctgatattccaatcataattatcagtggcgaccgccttgaggagacggataaagttgttgcactcgagctaggagcaagtgattttatcgctaagccgttcagtatcagagagtttctagcacgcattcgggttgccttgcgcgtgcgccccaacgttgtccgctccaaagaccgacggtctttttgttttactgactggacacttaatctcaggcaacgtcgcttgatgtccgaagctggcggtgaggtgaaacttacggcaggtgagttcaatcttctcctcgcgtttttagagaaaccccgcgacgttctatcgcgcgagcaacttctcattgccagtcgagtacgcgacgaggaggtttatgacaggagtatagatgttctcattttgaggctgcgccgcaaacttgaggcagatccgtcaagccctcaactgataaaaacagcaagaggtgccggttatttctttgacgcggacgtgcaggtttcgcacggggggacgatggcagcctgagccaattcccagatccccgaggaatcggcgtgagcggtcgcaaaccatccggcccggtacaaatcggcgcggcgctgggtgatgacctggtggagaagttgaaggccgcgcaggccgcccagcggcaacgcatcgaggcagaagcacgccccggtgaatcgtggcaagcggccgctgatcgaatccgcaaagaatcccggcaaccgccggcagccggtgcgccgtcgattaggaagccgcccaagggcgacgagcaaccagattttttcgttccgatgctctatgacgtgggcacccgcgatagtcgcagcatcatggacgtggccgttttccgtctgtcgaagcgtgaccgacgagctggcgaggtgatccgctacgagcttccagacgggcacgtagaggtttccgcagggccggccggcatggccagtgtgtgggattacgacctggtactgatggcggtttcccatctaaccgaatccatgaaccgataccgggaagggaagggagacaagcccggccgcgtgttccgtccacacgttgcggacgtactcaagttctgccggcgagccgatggcggaaagcagaaagacgacctggtagaaacctgcattcggttaaacaccacgcacgttgccatgcagcgtacgaagaaggccaagaacggccgcctggtgacggtatccgagggtgaagccttgattagccgctacaagatcgtaaagagcgaaaccgggcggccggagtacatcgagatcgagctggctgattggatgtaccgcgagatcacagaaggcaagaacccggacgtgctgacggttcaccccgattactttttgatcgatcccggcatcggccgttttctctaccgcctggcacgccgcgccgcaggcaaggcagaagccagatggttgttcaagacgatctacgaacgcagtggcagcgccggagagttcaagaagttctgtttcaccgtgcgcaagctgatcgggtcaaatgacctgccggagtacgatttgaaggaggaggcggggcaggctggcccgatcctagtcatgcgctaccgcaacctgatcgagggcgaagcatccgccggttcctaatgtacggagcagatgctagggcaaattgccctagcaggggaaaaaggtcgaaaaggtctctttcctgtggatagcacgtacattgggaacccaaagccgtacattgggaaccggaacccgtacattgggaacccaaagccgtacattgggaaccggtcacacatgtaagtgactgatataaaagagaaaaaaggcgatttttccgcctaaaactctttaaaacttattaaaactcttaaaacccgcctggcctgtgcataactgtctggccagcgcacagccgaagagctgcaaaaagcgcctacccttcggtcgctgcgctccctacgccccgccgcttcgcgtcggcctatcgcggccgctggccgctcaaaaatggctggcctacggccaggcaatctaccagggcgcggacaagccgcgccgtcgccactcgaccgccggcgctgaggtctgcctcgtgaagaaggtgttgctgactcataccaggcctgaatcgccccatcatccagccagaaagtgagggagccacggttgatgagagctttgttgtaggtggaccagttggtgattttgaacttttgctttgccacggaacggtctgcgttgtcgggaagatgcgtgatctgatccttcaactcagcaaaagttcgatttattcaacaaagccgccgtcccgtcaagtcagcgtaatgctctgccagtgttacaaccaattaaccaattctgattagaaaaactcatcgagcatcaaatgaaactgcaatttattcatatcaggattatcaataccatatttttgaaaaagccgtttctgtaatgaaggagaaaactcaccgaggcagttccataggatggcaagatcctggtatcggtctgcgattccgactcgtccaacatcaatacaacctattaatttcccctcgtcaaaaataaggttatcaagtgagaaatcaccatgagtgacgactgaatccggtgagaatggcaaaagctctgcattaatgaatcggccaacgcgcggggagaggcggtttgcgtattgggcgctcttccgcttcctcgctcactgactcgctgcgctcggtcgttcggctgcggcgagcggtatcagctcactcaaaggcggtaatacggttatccacagaatcaggggataacgcaggaaagaacatgtgagcaaaaggccagcaaaaggccaggaaccgtaaaaaggccgcgttgctggcgtttttccataggctccgcccccctgacgagcatcacaaaaatcgacgctcaagtcagaggtggcgaaacccgacaggactataaagataccaggcgtttccccctggaagctccctcgtgcgctctcctgttccgaccctgccgcttaccggatacctgtccgcctttctcccttcgggaagcgtggcgctttctcatagctcacgctgtaggtatctcagttcggtgtaggtcgttcgctccaagctgggctgtgtgcacgaaccccccgttcagcccgaccgctgcgccttatccggtaactatcgtcttgagtccaacccggtaagacacgacttatcgccactggcagcagccactggtaacaggattagcagagcgaggtatgtaggcggtgctacagagttcttgaagtggtggcctaactacggctacactagaagaacagtatttggtatctgcgctctgctgaagccagttaccttcggaaaaagagttggtagctcttgatccggcaaacaaaccaccgctggtagcggtggtttttttgtttgcaagcagcagattacgcgcagaaaaaaaggatctcaagaagatcctttgatcttttctacggggtctgacgctcagtggaacgaaaactcacgttaagggattttggtcatgagattatcaaaaaggatcttcacctagatccttttgatccggaatta

SEQ ID NO: 127 - protein, 1341 aa, synthetic construct
MPKKKRKVGGGGSGGGGSGGGGSGGGGSGGGGSGGGGSMLFQDFTHLYPLSKTVRFELKPIGRTLEHIHAKNFLSQDETMADMYQKVKVILDDYHRDFIADMMGEVKLTKLAEFYDVYLKFRKNPKDDGLQKQLKDLQAVLRKESVKPIGSGGKYKTGYDRLFGAKLFKDGKELGDLAKFVIAQEGESSPKLAHLAHFEKFSTYFTGFHDNRKNMYSDEDKHTAIAYRLIHENLPRFIDNLQILTTIKQKHSALYDQIINELTASGLDVSLASHLDGYHKLLTQEGITAYNRIIGEVNGYTNKHNQICHKSERIAKLRPLHKQILSDGMGVSFLPSKFADDSEMCQAVNEFYRHYTDVFAKVQSLFDGFDDHQKDGIYVEHKNLNELSKQAFGDFALLGRVLDGYYVDVVNPEFNERFAKAKTDNAKAKLTKEKDKFIKGVHSLASLEQAIEHHTARHDDESVQAGKLGQYFKHGLAGVDNPIQKIHNNHSTIKGFLERERPAGERALPKIKSGKNPEMTQLRQLKELLDNALNVAHFAKLLTTKTTLDNQDGNFYGEFGVLYDELAKIPTLYNKVRDYLSQKPFSTEKYKLNFGNPTLLNGWDLNKEKDNFGVILQKDGCYYLALLDKAHKKVFDNAPNTGKNVYQKMVYKLLPGPNKMLPKVFFAKSNLDYYNPSAELLDKYAKGTHKKGDNFNLKDCHALIDFFKAGINKHPEWQHFGFKFSPTSSYRDLSDFYREVEPQGYQVKFVDINADYIDELVEQGKLYLFQIYNKDFSPKAHGKPNLHTLYFKALFSEDNLADPIYKLNGEAQIFYRKASLDMNETTIHRAGEVLENKNPDNPKKRQFVYDIIKDKRYTQDKFMLHVPITMNFGVQGMTIKEFNKKVNQSIQQYDEVNVIGIDRGERHLLYLTVINSKGEILEQRSLNDITTASANGTQVTTPYHKILDKREKERVAARVGWGEIETIKELKSGYLSHVVHQINQLMLKYNAIVVLEDLNFGFKRGRFKVEKQIYQNFENALIKKLNHLVLKDKADDEIGSYKNALQLTNNFTDLKSIGKQTGFLFYVPAWNTSKIDPETGFVDLLKPRYENIAQSQAFFGKFDKICYNTDKGYFEFHIDYAKFTDKAKNSRQKWAICSHGDKRYVYDKTANQNKGAAKGINVNDELKSLFARYHINDKQPNLVMDICQNNDKEFHKSLMCLLKTLLALRYSNASSDEDFILSPVANDEGVFFNSALADDTQPQNADANGAYHIALKGLWLLNELKNSDDLNKVKLAIDNQTWLNFAQNRGGGGSGGGGSGGGGSGGGGSGGGGSGGGGSPKKKRKVSGGSSGGSPKKKRKV

SEQ ID NO: 128 - DNA, 17531 bp, synthetic construct
  source 1..17531: mol_type = other DNA
attcctgtggttggcatgcacatacaaatggacgaacggataaaccttttcacgcccttttaaatatccgattattctaataaacgctcttttctcttaggtttacccgccaatatatcctgtcaaacactgatagtttaaactggcactagcctaacggtgttgactaactaggccgcttccctaattagctaacccgggggcgcgccgggaccggaattcattatgtggtctaggtaggttctatatataagaaaacttgaaatgttctaaaaaaaaattcaagcccatgcatgattgaagcaaacggtatagcaacggtgttaacctgatctagtgatctcttgcaatccttaacggccacctaccgcaggtagcaaacggcgtccccctcctcgatatctccgcggcgacctctggctttttccgcggaattgcgcggtggggacggattccacgagaccgcgacgcaaccgcctctcgccgctgggccccacaccgctcggtgccgtagcctcacgggactctttctccctcctcccccgttataaattggcttcatcccctccttgcctcatccatccaaatcccagtccccaatcccatcccttcgtaggagaaattcatcgaagctaagcgaatcctcgcgatcctctcaaggtactgcgagttttcgatccccctctcgacccctcgtatgtttgtgtttgtcgtagcgtttgattaggtatgctttccctgtttgtgttcgtcgtagcgtttgattaggtatgctttccctgttcgtgttcatcgtagtgtttgattaggtcgtgtgaggcgatggcctgctcgcgtccttcgatctgtagtcgatttgcgggtcgtggtgtagatctgcgggctgtgatgaagttatttggtgtgatctgctcgcctgattctgcgggttggctcgagtagatatgatggttggaccggttggttcgtttaccgcgctagggttgggctgggatgatgttgcatgcgccgttgcgcgtgatcccgcagcaggacttgcgtttgattgccagatctcgttacgattatgtgatttggtttggactttttagatctgtagcttctgcttatgtgccagatgcgcctactgctcatatgcctgatgataatcataaatggctgtggaactaactagttgattgcggagtcatgtatcagctacaggtgtagggactagctacaggtgtagggacttgcgtctaattgtttggtcctttactcatgttgcaattatgcaatttagtttagattgtttgttccactcatctaggctgtaaaagggacactgcttagattgctgtttaatctttttagtagattatattatattggtaacttattacccctattacatgccatacgtgacttctgctcatgcctgatgataatcatagatcactgtggaattaattagttgattgttgaatcatgtttcatgtacataccacggcacaattgcttagttccttaacaaatgcaaattttactgatccatgtatgatttgcgtggttctctaatgtgaaatactatagctacttgttagtaagaatcaggttcgtatgcttaatgctgtatgtgccttctgctcatgcctgatgataatcatatatcactggaattaattagttgatcgtttaatcatatatcaagtacataccatgccacaatttttagtcacttaacccatgcagattgaactggtccctgcatgttttgctaaattgttctattctgattagaccatatatcatgtatttttttttggtaatggttctcttattttaaatgctatatagttctggtacttgttagaaagatctgcttcatagtttagttgcctatccctcgaattaggatgctgagcagctgatcctatagctttgtttcatgtatcaattcttttgtgttcaacagtcagtttttgttagattcattgtaacttatggtcgcttactcttctggtcctcaatgcttgcagggatcccctaaatagaccatgccgaagaagaagcgcaaggtcgggggcgggggctcaggcgggggcgggagcggcggcgggggctctgggggcggcggcagcggcgggggcggcagcgggggcggcgggtcgatgctgttccaggatttcactcatctgtaccctctctcaaagactgttcggttcgagctcaagcctattgggcggactctggagcacatccacgcgaagaacttcctcagccaggacgaaaccatggccgacatgtaccagaaggtcaaggtcatcctcgacgactaccacagggacttcatcgcggacatgatgggcgaggtgaagctgacgaagctcgccgagttctacgacgtctacctcaagttccgcaagaacccgaaggacgacggcctccagaagcagctcaaggacctgcaggccgtcctgaggaaggagtccgtcaagcccatcggcagcggcggcaagtacaagaccggctacgacaggctgttcggcgccaagctgttcaaggacggcaaggagctcggcgacctggcgaagttcgtgatcgcgcaggagggcgagagctcccccaagctggcccacctggcccacttcgagaagttcagcacgtacttcaccggcttccacgacaacaggaagaacatgtacagcgacgaggacaagcacacggccatcgcctaccgcctcatccacgagaacctgccccgcttcatcgacaacctgcagatcctgacgaccatcaagcagaagcactccgccctgtacgaccagatcatcaacgagctcaccgcgagcggcctcgacgtgtccctcgccagccacctcgacggctaccacaagctcctgacccaggagggcatcaccgcctacaaccgcatcatcggcgaggtgaacggctacaccaacaagcacaaccagatctgccacaagtccgagaggatcgccaagctcaggcccctgcacaagcagatcctcagcgacggcatgggcgtgagcttcctcccgtccaagttcgccgacgactccgagatgtgccaggccgtgaacgagttctacaggcactacaccgacgtgttcgccaaggtgcagtccctgttcgacggcttcgacgaccaccagaaggacggcatctacgtggagcacaagaacctgaacgagctgtccaagcaggccttcggcgacttcgccctcctgggccgcgtgctggacggctactacgtggacgtcgtgaacccggagttcaacgagcgcttcgcgaaggcgaagacggacaacgcgaaggccaagctcaccaaggagaaggacaagttcatcaagggcgtccacagcctcgcgtccctggagcaggcgatcgagcaccacaccgcgcgccacgacgacgagtccgtgcaggccggcaagctcggccagtacttcaagcacggcctggccggcgtcgacaacccgatccagaagatccacaacaaccactccaccatcaagggcttcctggagagggagcgcccggcgggcgagcgcgcgctccccaagatcaagtccggcaagaaccccgagatgacgcagctcaggcagctgaaggagctgctcgacaacgcgctcaacgtggcgcacttcgccaagctgctcacgaccaagaccacgctggacaaccaggacggcaacttctacggcgagttcggcgtcctgtacgacgagctggcgaagatcccgaccctgtacaacaaggtccgcgactacctgagccagaagcccttctccaccgagaagtacaagctcaacttcggcaacccgaccctcctgaacggctgggacctcaacaaggagaaggacaacttcggcgtgatcctccagaaggacggctgctactacctcgccctgctggacaaggcgcacaagaaggtcttcgacaacgccccgaacaccggcaagaacgtgtaccagaagatggtgtacaagctgctccccggccccaacaagatgctgccgaaggtgttcttcgcgaagtccaacctcgactactacaaccccagcgccgagctcctggacaagtacgccaagggcacgcacaagaagggcgacaacttcaacctcaaggactgccacgcgctgatcgacttcttcaaggcgggcatcaacaagcaccccgagtggcagcacttcggcttcaagttcagcccgacctccagctacagggacctcagcgacttctaccgcgaggtggagccccagggctaccaggtgaagttcgtcgacatcaacgccgactacatcgacgagctcgtcgagcagggcaagctctacctgttccagatctacaacaaggacttctccccgaaggcccacggcaagccgaacctccacacgctctacttcaaggccctcttcagcgaggacaacctggccgacccgatctacaagctcaacggcgaggcgcagatcttctaccgcaaggccagcctggacatgaacgaaacgaccatccacagggccggcgaggtcctggagaacaagaacccggacaacccgaagaagaggcagttcgtctacgacatcatcaaggacaagaggtacacccaggacaagttcatgctccacgtcccgatcaccatgaacttcggcgtccagggcatgaccatcaaggagttcaacaagaaggtcaaccagagcatccagcagtacgacgaggtgaacgtcatcggcatcgaccgcggcgagaggcacctgctctacctgacggtcatcaactccaagggcgagatcctcgagcagcgcagcctgaacgacatcacgaccgcgagcgccaacggcacgcaggtcaccacgccgtaccacaagatcctcgacaagcgcgagaaggagagggtggccgcgcgcgtcggctggggcgagatcgaaacgatcaaggagctcaagtccggctacctcagccacgtcgtgcaccagatcaaccagctcatgctgaagtacaacgcgatcgtggtcctcgaggacctgaacttcggcttcaagaggggccgcttcaaggtggagaagcagatctaccagaacttcgagaacgccctgatcaagaagctcaaccacctggtcctcaaggacaaggcggacgacgagatcggcagctacaagaacgcgctccagctgaccaacaacttcacggacctcaagtccatcggcaagcagacgggcttcctgttctacgtgccggcgtggaacacctccaagatcgacccggaaaccggcttcgtcgacctgctcaagccgcgctacgagaacatcgcgcagtcccaggcgttcttcggcaagttcgacaagatctgctacaacaccgacaagggctacttcgagttccacatcgactacgcgaagttcaccgacaaggccaagaactccaggcagaagtgggccatctgcagccacggcgacaagcgctacgtgtacgacaagacggcgaaccagaacaagggcgcggccaagggcatcaacgtgaacgacgagctgaagtccctcttcgcgcgctaccacatcaacgacaagcagccgaacctcgtcatggacatctgccagaacaacgacaaggagttccacaagagcctgatgtgcctgctcaagaccctgctcgccctccgctactccaacgcgagctccgacgaggacttcatcctcagccccgtcgcgaacgacgagggcgtgttcttcaactccgccctcgcggacgacacgcagccgcagaacgccgacgcgaacggcgcctaccacatcgccctcaagggcctgtggctgctcaacgagctcaagaactccgacgacctgaacaaggtgaagctcgccattgacaaccagacgtggctgaatttcgctcagaatagggggggcgggggctcaggcgggggcgggagcggcggcgggggctctgggggcggcggcagcggcgggggcggcagcgggggcggcgggtcgccgaagaagaagcgcaaggtgtccggcggcagctccggcggcagcccgaagaagaagcgcaaagtgtgagggacccgatcgttcaaacatttggcaataaagtttcttaagattgaatcctgttgccggtcttgcgatgattatcatataatttctgttgaattacgttaagcatgtaataattaacatgtaatgcatgacgttatttatgagatgggtttttatgattagagtcccgcaattatacatttaatacgcgatagaaaacaaaatatagcgcgcaaactaggataaattatcgcgcgcggtgtcatctatgttactagatcggtaccgaattcattatgtggtctaggtaggttctatatataagaaaacttgaaatgttctaaaaaaaaattcaagcccatgcatgattgaagcaaacggtatagcaacggtgttaacctgatctagtgatctcttgcaatccttaacggccacctaccgcaggtagcaaacggcgtccccctcctcgatatctccgcggcgacctctggctttttccgcggaattgcgcggtggggacggattccacgagaccgcgacgcaaccgcctctcgccgctgggccccacaccgctcggtgccgtagcctcacgggactctttctccctcctcccccgttataaattggcttcatcccctccttgcctcatccatccaaatcccagtccccaatcccatcccttcgtaggagaaattcatcgaagctaagcgaatcctcgcgatcctctcaaggtactgcgagttttcgatccccctctcgacccctcgtatgtttgtgtttgtcgtagcgtttgattaggtatgctttccctgtttgtgttcgtcgtagcgtttgattaggtatgctttccctgttcgtgttcatcgtagtgtttgattaggtcgtgtgaggcgatggcctgctcgcgtccttcgatctgtagtcgatttgcgggtcgtggtgtagatctgcgggctgtgatgaagttatttggtgtgatctgctcgcctgattctgcgggttggctcgagtagatatgatggttggaccggttggttcgtttaccgcgctagggttgggctgggatgatgttgcatgcgccgttgcgcgtgatcccgcagcaggacttgcgtttgattgccagatctcgttacgattatgtgatttggtttggactttttagatctgtagcttctgcttatgtgccagatgcgcctactgctcatatgcctgatgataatcataaatggctgtggaactaactagttgattgcggagtcatgtatcagctacaggtgtagggactagctacaggtgtagggacttgcgtctaattgtttggtcctttactcatgttgcaattatgcaatttagtttagattgtttgttccactcatctaggctgtaaaagggacactgcttagattgctgtttaatctttttagtagattatattatattggtaacttattacccctattacatgccatacgtgacttctgctcatgcctgatgataatcatagatcactgtggaattaattagttgattgttgaatcatgtttcatgtacataccacggcacaattgcttagttccttaacaaatgcaaattttactgatccatgtatgatttgcgtggttctctaatgtgaaatactatagctacttgttagtaagaatcaggttcgtatgcttaatgctgtatgtgccttctgctcatgcctgatgataatcatatatcactggaattaattagttgatcgtttaatcatatatcaagtacataccatgccacaatttttagtcacttaacccatgcagattgaactggtccctgcatgttttgctaaattgttctattctgattagaccatatatcatgtatttttttttggtaatggttctcttattttaaatgctatatagttctggtacttgttagaaagatctgcttcatagtttagttgcctatccctcgaattaggatgctgagcagctgatcctatagctttgtttcatgtatcaattcttttgtgttcaacagtcagtttttgttagattcattgtaacttatggtcgcttactcttctggtcctcaatgcttgcagaagcttgaaattctgatgagtccgtgaggacgaaacgagtaagctcgtcaatttctactgtttgtagatgggaaagaccgaggagaagatctaatttctactgtttgtagatgcaccaaggaaggggaggagatcaatttctactgtttgtagatgtcacagatcacaaacttcaaatgaatttctactgtttgtagatacgcccagaaagcatacgcagtcggccggcatggtcccagcctcctcgctggcgccggctgggcaacatgcttcggcatggcgaatgggacgatcgttcaaacatttggcaataaagtttcttaagattgaatcctgttgccggtcttgcgatgattatcatataatttctgttgaattacgttaagcatgtaataattaacatgtaatgcatgacgttatttatgagatgggtttttatgattagagtcccgcaattatacatttaatacgcgatagaaaacaaaatatagcgcgcaaactaggataaattatcgcgcgcggtgtcatctatgttactagatccctaggctgcagtgcagcgtgacccggtcgtgcccctctctagagataatgagcattgcatgtctaagttataaaaaattaccacatattttttttgtcacacttgtttgaagtgcagtttatctatctttatacatatatttaaactttactctacgaataatataatctatagtactacaataatatcagtgttttagagaatcatataaatgaacagttagacatggtctaaaggacaattgagtattttgacaacaggactctacagttttatctttttagtgtgcatgtgttctcctttttttttgcaaatagcttcacctatataatacttcatccattttattagtacatccatttagggtttagggttaatggtttttatagactaatttttttagtacatctattttattctattttagcctctaaattaagaaaactaaaactctattttagtttttttatttaataatttagatataaaatagaataaaataaagtgactaaaaattaaacaaataccctttaagaaattaaaaaaactaaggaaacatttttcttgtttcgagtagataatgccagcctgttaaacgccgtcgacgagtctaacggacaccaaccagcgaaccagcagcgtcgcgtcgggccaagcgaagcagacggcacggcatctctgtcgctgcctctggacccctctcgagagttccgctccaccgttggacttgctccgctgtcggcatccagaaattgcgtggcggagcggcagacgtgagccggcacggcaggcggcctcctcctcctctcacggcaccggcagctacgggggattcctttcccaccgctccttcgctttcccttcctcgcccgccgtaataaatagacaccccctccacaccctctttccccaacctcgtgttgttcggagcgcacacacacacaaccagatctcccccaaatccacccgtcggcacctccgcttcaaggtacgccgctcgtcctccccccccccccctctctaccttctctagatcggcgttccggtccatggttagggcccggtagttctacttctgttcatgtttgtgttagatccgtgtttgtgttagatccgtgctgctagcgttcgtacacggatgcgacctgtacgtcagacacgttctgattgctaacttgccagtgtttctctttggggaatcctgggatggctctagccgttccgcagacgggatcgatttcatgattttttttgtttcgttgcatagggtttggtttgcccttttcctttatttcaatatatgccgtgcacttgtttgtcgggtcatcttttcatgcttttttttgtcttggttgtgatgatgtggtctggttgggcggtcgttctagatcggagtagaattctgtttcaaactacctggtggatttattaattttggatctgtatgtgtgtgccatacatattcatagttacgaattgaagatgatggatggaaatatcgatctaggataggtatacatgttgatgcgggttttactgatgcatatacagagatgctttttgttcgcttggttgtgatgatgtggtgtggttgggcggtcgttcattcgttctagatcggagtagaatactgtttcaaactacctggtgtatttattaattttggaactgtatgtgtgtgtcatacatcttcatagttacgagtttaagatggatggaaatatcgatctaggataggtatacatgttgatgtgggttttactgatgcatatacatgatggcatatgcagcatctattcatatgctctaaccttgagtacctatctattataataaacaagtatgttttataattattttgatcttgatatacttggatgatggcatatgcagcagctatatgtggatttttttagccctgccttcatacgctatttatttgcttggtactgtttcttttgtcgatgctcaccctgttgtttggtgttacttctgcagggatcaccgatcatgcaaaaactcattaactcagtgcaaaactatgcctggggcagcaaaacggcgttgactgaactttatggtatggaaaatccgtccagccagccgatggccgagctgtggatgggcgcacatccgaaaagcagttcacgagtgcagaatgccgccggagatatcgtttcactgcgtgatgtgattgagagtgataaatcgactctgctcggagaggccgttgccaaacgctttggcgaactgcctttcctgttcaaagtattatgcgcagcacagccactctccattcaggttcatccaaacaaacacaattctgaaatcggttttgccaaagaaaatgccgcaggtatcccgatggatgccgccgagcgtaactataaagatcctaaccacaagccggagctggtttttgcgctgacgcctttccttgcgatgaacgcgtttcgtgaattttccgagattgtctccctactccagccggtcgcaggtgcacatccggcgattgctcactttttacaacagcctgatgccgaacgtttaagcgaactgttcgccagcctgttgaatatgcagggtgaagaaaaatcccgcgcgctggcgattttaaaatcggccctcgatagccagcagggtgaaccgtggcaaacgattcgtttaatttctgaattttacccggaagacagcggtctgttctccccgctattgctgaatgtggtgaaattgaaccctggcgaagcgatgttcctgttcgctgaaacaccgcacgcttacctgcaaggcgtggcgctggaagtgatggcaaactccgataacgtgctgcgtgcgggtctgacgcctaaatacattgatattccggaactggttgccaatgtgaaattcgaagccaaaccggctaaccagttgttgacccagccggtgaaacaaggtgcagaactggacttcccgattccagtggatgattttgccttctcgctgcatgaccttagtgataaagaaaccaccattagccagcagagtgccgccattttgttctgcgtcgaaggcgatgcaacgttgtggaaaggttctcagcagttacagcttaaaccgggtgaatcagcgtttattgccgccaacgaatcaccggtgactgtcaaaggccacggccgtttagcgcgtgtttacaacaagctgtaagagcttactgaaaaaattaacatctcttgctaagctgggagctcgatccgtcgacctgcagatcgttcaaacatttggcaataaagtttcttaagattgaatcctgttgccggtcttgcgatgattatcatataatttctgttgaattacgttaagcatgtaataattaacatgtaatgcatgacgttatttatgagatgggtttttatgattagagtcccgcaattatacatttaatacgcgatagaaaacaaaatatagcgcgcaaactaggataaattatcgcgcgcggtgtcatctatgttactagatccggaccgcctgcaggcccgggggcgcgccctaattagctaacggccaggatcgccgcgtgagcctttagcaactagctagattaattaacgcaatctgttattaagttgtctaagcgtcaatttgtttacaccacaatatatcctgccaccagccagccaacagctccccgaccggcagctcggcacaaaatcaccactcgatacaggcagcccatcagaattaattctcatgtttgacagcttatcatcgactgcacggtgcaccaatgcttctggcgtcaggcagccatcggaagctgtggtatggctgtgcaggtcgtaaatcactgcataattcgtgtcgctcaaggcgcactcccgttctggataatgttttttgcgccgacatcataacggttctggcaaatattctgaaatgagctgttgacaattaatcatccggctcgtataatgtgtggaattgtgagcggataacaatttcacacaggaaacagaccatgagggaagcgttgatcgccgaagtatcgactcaactatcagaggtagttggcgtcatcgagcgccatctcgaaccgacgttgctggccgtacatttgtacggctccgcagtggatggcggcctgaagccacacagtgatattgatttgctggttacggtgaccgtaaggcttgatgaaacaacgcggcgagctttgatcaacgaccttttggaaacttcggcttcccctggagagagcgagattctccgcgctgtagaagtcaccattgttgtgcacgacgacatcattccgtggcgttatccagctaagcgcgaactgcaatttggagaatggcagcgcaatgacattcttgcaggtatcttcgagccagccacgatcgacattgatctggctatcttgctgacaaaagcaagagaacatagcgttgccttggtaggtccagcggcggaggaactctttgatccggttcctgaacaggatctatttgaggcgctaaatgaaaccttaacgctatggaactcgccgcccgactgggctggcgatgagcgaaatgtagtgcttacgttgtcccgcatttggtacagcgcagtaaccggcaaaatcgcgccgaaggatgtcgctgccgactgggcaatggagcgcctgccggcccagtatcagcccgtcatacttgaagctaggcaggcttatcttggacaagaagatcgcttggcctcgcgcgcagatcagttggaagaatttgttcactacgtgaaaggcgagatcaccaaagtagtcggcaaataaagctctagtggatctccgtacccagggatctggctcgcggcggacgcacgacgccggggcgagaccataggcgatctcctaaatcaatagtagctgtaacctcgaagcgtttcacttgtaacaacgattgagaatttttgtcataaaattgaaatacttggttcgcatttttgtcatccgcggtcagccgcaattctgacgaactgcccatttagctggagatgattgtacatccttcacgtgaaaatttctcaagcgctgtgaacaagggttcagattttagattgaaaggtgagccgttgaaacacgttcttcttgtcgatgacgacgtcgctatgcggcatcttattattgaataccttacgatccacgccttcaaagtgaccgcggtagccgacagcacccagttcacaagagtactctcttccgcgacggtcgatgtcgtggttgttgatctagatttaggtcgtgaagatgggctcgagatcgttcgtaatctggcggcaaagtctgatattccaatcataattatcagtggcgaccgccttgaggagacggataaagttgttgcactcgagctaggagcaagtgattttatcgctaagccgttcagtatcagagagtttctagcacgcattcgggttgccttgcgcgtgcgccccaacgttgtccgctccaaagaccgacggtctttttgttttactgactggacacttaatctcaggcaacgtcgcttgatgtccgaagctggcggtgaggtgaaacttacggcaggtgagttcaatcttctcctcgcgtttttagagaaaccccgcgacgttctatcgcgcgagcaacttctcattgccagtcgagtacgcgacgaggaggtttatgacaggagtatagatgttctcattttgaggctgcgccgcaaacttgaggcagatccgtcaagccctcaactgataaaaacagcaagaggtgccggttatttctttgacgcggacgtgcaggtttcgcacggggggacgatggcagcctgagccaattcccagatccccgaggaatcggcgtgagcggtcgcaaaccatccggcccggtacaaatcggcgcggcgctgggtgatgacctggtggagaagttgaaggccgcgcaggccgcccagcggcaacgcatcgaggcagaagcacgccccggtgaatcgtggcaagcggccgctgatcgaatccgcaaagaatcccggcaaccgccggcagccggtgcgccgtcgattaggaagccgcccaagggcgacgagcaaccagattttttcgttccgatgctctatgacgtgggcacccgcgatagtcgcagcatcatggacgtggccgttttccgtctgtcgaagcgtgaccgacgagctggcgaggtgatccgctacgagcttccagacgggcacgtagaggtttccgcagggccggccggcatggccagtgtgtgggattacgacctggtactgatggcggtttcccatctaaccgaatccatgaaccgataccgggaagggaagggagacaagcccggccgcgtgttccgtccacacgttgcggacgtactcaagttctgccggcgagccgatggcggaaagcagaaagacgacctggtagaaacctgcattcggttaaacaccacgcacgttgccatgcagcgtacgaagaaggccaagaacggccgcctggtgacggtatccgagggtgaagccttgattagccgctacaagatcgtaaagagcgaaaccgggcggccggagtacatcgagatcgagctggctgattggatgtaccgcgagatcacagaaggcaagaacccggacgtgctgacggttcaccccgattactttttgatcgatcccggcatcggccgttttctctaccgcctggcacgccgcgccgcaggcaaggcagaagccagatggttgttcaagacgatctacgaacgcagtggcagcgccggagagttcaagaagttctgtttcaccgtgcgcaagctgatcgggtcaaatgacctgccggagtacgatttgaaggaggaggcggggcaggctggcccgatcctagtcatgcgctaccgcaacctgatcgagggcgaagcatccgccggttcctaatgtacggagcagatgctagggcaaattgccctagcaggggaaaaaggtcgaaaaggtctctttcctgtggatagcacgtacattgggaacccaaagccgtacattgggaaccggaacccgtacattgggaacccaaagccgtacattgggaaccggtcacacatgtaagtgactgatataaaagagaaaaaaggcgatttttccgcctaaaactctttaaaacttattaaaactcttaaaacccgcctggcctgtgcataactgtctggccagcgcacagccgaagagctgcaaaaagcgcctacccttcggtcgctgcgctccctacgccccgccgcttcgcgtcggcctatcgcggccgctggccgctcaaaaatggctggcctacggccaggcaatctaccagggcgcggacaagccgcgccgtcgccactcgaccgccggcgctgaggtctgcctcgtgaagaaggtgttgctgactcataccaggcctgaatcgccccatcatccagccagaaagtgagggagccacggttgatgagagctttgttgtaggtggaccagttggtgattttgaacttttgctttgccacggaacggtctgcgttgtcgggaagatgcgtgatctgatccttcaactcagcaaaagttcgatttattcaacaaagccgccgtcccgtcaagtcagcgtaatgctctgccagtgttacaaccaattaaccaattctgattagaaaaactcatcgagcatcaaatgaaactgcaatttattcatatcaggattatcaataccatatttttgaaaaagccgtttctgtaatgaaggagaaaactcaccgaggcagttccataggatggcaagatcctggtatcggtctgcgattccgactcgtccaacatcaatacaacctattaatttcccctcgtcaaaaataaggttatcaagtgagaaatcaccatgagtgacgactgaatccggtgagaatggcaaaagctctgcattaatgaatcggccaacgcgcggggagaggcggtttgcgtattgggcgctcttccgcttcctcgctcactgactcgctgcgctcggtcgttcggctgcggcgagcggtatcagctcactcaaaggcggtaatacggttatccacagaatcaggggataacgcaggaaagaacatgtgagcaaaaggccagcaaaaggccaggaaccgtaaaaaggccgcgttgctggcgtttttccataggctccgcccccctgacgagcatcacaaaaatcgacgctcaagtcagaggtggcgaaacccgacaggactataaagataccaggcgtttccccctggaagctccctcgtgcgctctcctgttccgaccctgccgcttaccggatacctgtccgcctttctcccttcgggaagcgtggcgctttctcatagctcacgctgtaggtatctcagttcggtgtaggtcgttcgctccaagctgggctgtgtgcacgaaccccccgttcagcccgaccgctgcgccttatccggtaactatcgtcttgagtccaacccggtaagacacgacttatcgccactggcagcagccactggtaacaggattagcagagcgaggtatgtaggcggtgctacagagttcttgaagtggtggcctaactacggctacactagaagaacagtatttggtatctgcgctctgctgaagccagttaccttcggaaaaagagttggtagctcttgatccggcaaacaaaccaccgctggtagcggtggtttttttgtttgcaagcagcagattacgcgcagaaaaaaaggatctcaagaagatcctttgatcttttctacggggtctgacgctcagtggaacgaaaactcacgttaagggattttggtcatgagattatcaaaaaggatcttcacctagatccttttgatccggaatta